(19) United States
(12) Patent Application Publication
(10) Pub. No.: US 2022/0177893 A1
(43) Pub. Date: Jun. 9, 2022

(54) COMPOUNDS AND METHODS FOR REDUCING KCNT1 EXPRESSION

(71) Applicant: Ionis Pharmaceuticals, Inc., Carlsbad, CA (US)

(72) Inventors: Huynh-Hoa Bui, San Diego, CA (US); Susan M. Freier, San Diego, CA (US)

(73) Assignee: Ionis Pharmaceuticals, Inc., Carlsbad, CA (US)

(21) Appl. No.: 17/437,507

(22) PCT Filed: Mar. 13, 2020
(86) PCT No.: PCT/US2020/022680

§ 371 Date: Sep. 9, 2021

Related U.S. Application Data
(60) Provisional application No. 62/884,501, filed on Aug. 8, 2019.
(60) Provisional application No. 62/819,344, filed on Mar. 15, 2019.

(51) Int. Cl. C12N 15/113

(52) U.S. Cl. CPC C12N 15/1138; C12N 2310/321; C12N 2310/315; C12N 2310/11; C12N 2310/3341; C12N 2310/341; C12N 2310/351

(57) ABSTRACT

Provided are compounds, methods, and pharmaceutical compositions for reducing the amount or activity of KCNT1 RNA in a cell or subject, and in certain instances reducing the amount of KCNT1 protein in a cell or subject. These compounds, methods, and pharmaceutical compositions are useful to ameliorate at least one symptom or hallmark of a neurological condition. Such symptoms and hallmarks include seizures, encephalopathy, and behavioral abnormalities. Non-limiting examples of neurological conditions that benefit from these compounds, methods, and pharmaceutical compositions are epilepsy of infancy with migrating focal seizures (EIMFS), autosomal dominant nocturnal frontal lobe epilepsy (ADNFLE), West syndrome, and Ohtahara syndrome.

### SEQUENCE LISTING

[0001] The present application is being filed along with a Sequence Listing in electronic format. The Sequence Listing is provided as a file entitled BIOL0358WOSEQ_ST25.txt, created on Mar. 9, 2020, which is 716 kb in size. The information in the electronic format of the sequence listing is incorporated herein by reference in its entirety.

### FIELD

[0002] Provided are compounds, methods, and pharmaceutical compositions for reducing the amount of potassium sodium-activated channel subfamily T member 1 (KCNT1) RNA in a cell or subject, and in certain instances reducing the amount of KCNT1 protein in a cell or subject. Such compounds, methods, and pharmaceutical compositions are useful to ameliorate at least one symptom or hallmark of a neurological condition. Such symptoms and hallmarks include, but are not limited to, encephalopathy, cerebral cortical atrophy, clonus, seizures (epilepsy), and behavioral abnormalities such as aggression, catatonia, psychosis, and other intellectual disabilities. Non-limiting examples of neurological conditions that may be treated with the compounds, methods, and pharmaceutical compositions disclosed herein are epilepsy of infancy with migrating focal seizures (EIMFS), autosomal dominant nocturnal frontal lobe epilepsy (ADNFLE), and early onset epileptic encephalopathies including West syndrome and Ohtahara syndrome.

### BACKGROUND

[0003] Epilepsy is a neurological disorder characterized by periodic abnormalities in brain activity. By way of non-limiting example, an individual having epilepsy often displays abnormal behavior such as seizures (uncontrollable jerking or twitching of the limbs), loss of consciousness, catatonia, confusion, and psychosis. Epileptic individuals may experience focal seizures or generalized seizures. Focal seizures affect a particular area in the brain. In contrast, generalized seizures affect all areas of the brain. Tragically, onset of epilepsy can occur within the first few months of life, as seen in patients with EIMFS and early infantile epileptic encephalopathy (EIEE). EIMFS is a severely pharmaco-resistant epilepsy with a high rate of sudden unexpected death in epilepsy. Onset of seizures in subjects with EIMFS often occurs in the first month of life.

[0004] KCNT1, also known as Sequence Like a Calcium Activated K+ channel (SLACK), K_{Ca}4.1 and Slo2.2, is a sodium gated potassium channel subunit that forms a tetrameric channel with KCNT2 to mediate a sodium-sensitive potassium current in a range of neuronal cells. Two splice isoforms of KCNT1 mRNA are expressed in humans. These isoforms may produce different proteins with different electrophysical properties, similar to SLACK isoform variants found in rodents.

[0005] Gain of function mutations in KCNT1 can cause several types of epilepsy, including ADNFLE and EIMFS. To date, all KCNT1 mutations found in epileptic subjects are missense mutations that result in KCNT1 protein gain of function. These missense mutations result in increased potassium channel activity and an increased peak potassium current. Approximately, 42-50% of EIMFS cases are due to KCNT1 gain of function mutations.

### SUMMARY OF THE INVENTION

[0006] Currently, there is a lack of acceptable options for treating infantile encephalopathies and epilepsies. Thus, these conditions present a high unmet need. In addition, there are many cases of epilepsy that are pharmaco-resistant, leaving patients with little or no therapeutic options. It is therefore an object herein to provide compounds, methods, and pharmaceutical compositions for the treatment of such diseases.

[0007] Provided herein are compounds, methods and pharmaceutical compositions for reducing the amount or activity of KCNT1 RNA, and in certain embodiments reducing the amount or activity of KCNT1 protein in a cell or a subject. In certain embodiments the subject is a human infant. In certain embodiments, the subject has a neurological condition. In certain embodiments, the neurological condition comprises encephalopathy. In certain embodiments, the neurological condition comprises epilepsy. In certain embodiments, the neurological condition is EIMFS. In certain embodiments, the neurological condition is ADNFLE. In certain embodiments, compounds useful for reducing the amount or activity of KCNT1 RNA are oligomeric compounds. In certain embodiments, compounds useful for reducing expression of KCNT1 RNA are modified oligonucleotides.

[0008] Also provided herein are methods useful for ameliorating at least one symptom or hallmark of a neurological condition. In certain embodiments, the neurological condition is EIMFS. In certain embodiments, the neurological condition is ADNFLE. In certain embodiments, the at least one symptom or hallmark is selected from seizure, brain damage, demyelination, hypotonia, microcephaly, depression, anxiety, cognitive function. In certain embodiments, methods disclosed herein are useful for reducing seizure occurrence. In certain embodiments, methods disclosed herein are useful for reducing seizure severity.

### DETAILED DESCRIPTION OF THE INVENTION

[0009] It is to be understood that both the foregoing general description and the following detailed description are exemplary and explanatory only and are not restrictive. Herein, the use of the singular includes the plural unless specifically stated otherwise. As used herein, the use of “or” means “and/or” unless stated otherwise. Furthermore, the use of the term “including” as well as other forms, such as “includes” and “included”, is not limiting. Also, terms such as “element” or “component” encompass both elements and components comprising one unit and elements and components that comprise more than one subunit, unless specifically stated otherwise.

[0010] The section headings used herein are for organizational purposes only and are not to be construed as limiting the subject matter described. All documents, or portions of documents, cited in this application, including, but not limited to, patents, patent applications, articles, books, and treatises, are hereby expressly incorporated-by-reference for the portions of the document discussed herein, as well as in their entirety.

### Definitions

[0011] Unless specific definitions are provided, the nomenclature used in connection with, and the procedures and techniques of, analytical chemistry, synthetic organic chemistry, and medicinal and pharmaceutical chemistry described herein are those well-known and commonly used in the art. Where permitted, all patents, applications, published applications and other publications and other data referred to throughout in the disclosure are incorporated by reference herein in their entirety.

[0012] Unless otherwise indicated, the following terms have the following meanings:

### Definitions

[0013] As used herein, “2′-deoxynucleoside” means a nucleoside comprising a 2′-H(H) deoxyribosyl sugar moiety. In certain embodiments, a 2′-deoxynucleoside is a 2′-β-D-deoxynucleoside and comprises a 2′-β-D-deoxyribosyl sugar moiety, which has the β-D configuration as found in naturally occurring deoxyribonucleic acids (DNA). In certain embodiments, a 2′-deoxynucleoside or nucleoside comprising an unmodified 2′-deoxyribosyl sugar moiety may comprise a modified nucleobase or may comprise an RNA nucleobase (uracil).

[0014] As used herein, “2′-MOE” or “2′-MOE sugar moiety” means a 2′-OCH₂CH₂OCH₃ group in place of the 2′-OH group of a ribosyl sugar moiety. “MOE” means methoxyethyl.

[0015] As used herein, “2′-MOE nucleoside” means a nucleoside comprising a 2′-MOE sugar moiety.

[0016] As used herein, “2′-OMe” or “2′-O-methyl sugar moiety” means a 2′-OCH₃ group in place of the 2′-OH group of a ribosyl sugar moiety.

[0017] As used herein, “2′-OMe nucleoside” means a nucleoside comprising a 2′-OMe sugar moiety.

[0018] As used herein, “2′-substituted nucleoside” means a nucleoside comprising a 2′-substituted sugar moiety. As used herein, “2′-substituted” in reference to a sugar moiety means a sugar moiety comprising at least one 2′-substituent group other than H or OH.

[0019] As used herein, “5-methyl cytosine” means a cytosine modified with a methyl group attached to the 5 position. A 5-methyl cytosine is a modified nucleobase.

[0020] As used herein, “administering” means providing a pharmaceutical agent to a subject.

[0021] As used herein, “antisense activity” means any detectable and/or measurable change attributable to the hybridization of an antisense compound to its target nucleic acid. In certain embodiments, antisense activity is a decrease in the amount or expression of a target nucleic acid or protein encoded by such target nucleic acid compared to target nucleic acid levels or target protein levels in the absence of the antisense compound.

[0022] As used herein, “antisense compound” means an oligomeric compound capable of achieving at least one antisense activity.

[0023] As used herein, “ameliorate” in reference to a treatment means improvement in at least one symptom relative to the same symptom in the absence of the treatment. In certain embodiments, amelioration is the reduction in the severity or frequency of a symptom or the delayed onset or slowing of progression in the severity or frequency of a symptom.

[0024] As used herein, “bicyclic nucleoside” or “BNA” means a nucleoside comprising a bicyclic sugar moiety.

[0025] As used herein, “bicyclic sugar” or “bicyclic sugar moiety” means a modified sugar moiety comprising two rings, wherein the second ring is formed via a bridge connecting two of the atoms in the first ring thereby forming a bicyclic structure. In certain embodiments, the first ring of the bicyclic sugar moiety is a furanosyl moiety. In certain embodiments, the bicyclic sugar moiety does not comprise a furanosyl moiety.

[0026] As used herein, “cleavable moiety” means a bond or group of atoms that is cleaved under physiological conditions, for example, inside a cell or a subject.

[0027] As used herein, “complementary” in reference to an oligonucleotide means that at least 70% of the nucleobases of the oligonucleotide or one or more regions thereof and the nucleobases of another nucleic acid or one or more regions thereof are capable of hydrogen bonding with one another when the nucleobase sequence of the oligonucleotide and the other nucleic acid are aligned in opposing directions. As used herein, “complementary nucleobases” means nucleobases that are capable of forming hydrogen bonds with one another. Complementary nucleobase pairs include adenine (A) with thymine (T), adenine (A) with uracil (U), cytosine (C) with guanine (G), and 5-methyl cytosine (mC) with guanine (G). Complementary oligonucleotides and/or nucleic acids need not have nucleobase complementarity at each nucleoside. Rather, some mismatches are tolerated. As used herein, “fully complementary” or “100% complementary” in reference to an oligonucleotide, or portion thereof, means that oligonucleotide, or portion thereof, is complementary to another oligonucleotide or nucleic acid at each nucleobase of the oligonucleotide.

[0028] As used herein, “conjugate group” means a group of atoms that is directly or indirectly attached to an oligonucleotide. Conjugate groups include a conjugate moiety and a conjugate linker that attaches the conjugate moiety to the oligonucleotide.

[0029] As used herein, “conjugate linker” means a single bond or a group of atoms comprising at least one bond that connects a conjugate moiety to an oligonucleotide.

[0030] As used herein, “conjugate moiety” means a group of atoms that is attached to an oligonucleotide via a conjugate linker.

[0031] As used herein, “contiguous” in the context of an oligonucleotide refers to nucleosides, nucleobases, sugar moieties, or internucleoside linkages that are immediately adjacent to each other. For example, “contiguous nucleobases” means nucleobases that are immediately adjacent to each other in a sequence.

[0032] As used herein, “constrained ethyl” or “cEt” or “cEt modified sugar” means a β-D ribosyl bicyclic sugar moiety wherein the second ring of the bicyclic sugar is formed via a bridge connecting the 4′-carbon and the 2′-carbon of the β-D ribosyl sugar moiety, wherein the bridge has the formula 4′-CH(CH₃)—O-2′, and wherein the methyl group of the bridge is in the S configuration.

[0033] As used herein, “cEt nucleoside” means a nucleoside comprising cEt modified sugar moiety.

[0034] As used herein, “chirally enriched population” means a plurality of molecules of identical molecular formula, wherein the number or percentage of molecules within the population that contain a particular stereochemical configuration at a particular chiral center is greater than the number or percentage of molecules expected to contain the same particular stereochemical configuration at the same particular chiral center within the population if the particular chiral center were stereorandom. Chirally enriched populations of molecules having multiple chiral centers within each molecule may contain one or more stereorandom chiral centers. In certain embodiments, the molecules are modified oligonucleotides. In certain embodiments, the molecules are compounds comprising modified oligonucleotides.

[0035] As used herein, “gapmer” means a modified oligonucleotide comprising an internal region having a plurality of nucleosides that support RNase H cleavage positioned between external regions having one or more nucleosides, wherein the nucleosides comprising the internal region are chemically distinct from the nucleoside or nucleosides comprising the external regions. The internal region may be referred to as the “gap” and the external regions may be referred to as the “wings.” Unless otherwise indicated, “gapmer” refers to a sugar motif Unless otherwise indicated, the sugar moiety of each nucleoside of the gap is a 2′-β-D-deoxyribosyl sugar moiety. Thus, the term “MOE gapmer” indicates a gapmer having a gap comprising 2′-β-D-deoxynucleosides and wings comprising 2′-MOE nucleosides. Unless otherwise indicated, a MOE gapmer may comprise one or more modified internucleoside linkages and/or modified nucleobases and such modifications do not necessarily follow the gapmer pattern of the sugar modifications.

[0036] As used herein, “hotspot region” is a range of nucleobases on a target nucleic acid that is amenable to oligomeric compound-mediated reduction of the amount or activity of the target nucleic acid.

[0037] As used herein, “hybridization” means the pairing or annealing of complementary oligonucleotides and/or nucleic acids. While not limited to a particular mechanism, the most common mechanism of hybridization involves hydrogen bonding, which may be Watson-Crick, Hoogsteen or reversed Hoogsteen hydrogen bonding, between complementary nucleobases.

[0038] As used herein, “internucleoside linkage” means the covalent linkage between contiguous nucleosides in an oligonucleotide. As used herein “modified internucleoside linkage” means any internucleoside linkage other than a phosphodiester internucleoside linkage. “Phosphorothioate internucleoside linkage” is a modified internucleoside linkage in which one of the non-bridging oxygen atoms of a phosphodiester internucleoside linkage is replaced with a sulfur atom.

[0039] As used herein, “linker-nucleoside” means a nucleoside that links, either directly or indirectly, an oligonucleotide to a conjugate moiety. Linker-nucleosides are located within the conjugate linker of an oligomeric compound. Linker-nucleosides are not considered part of the oligonucleotide portion of an oligomeric compound even if they are contiguous with the oligonucleotide.

[0040] As used herein, “non-bicyclic modified sugar moiety” means a modified sugar moiety that comprises a modification, such as a substituent, that does not form a bridge between two atoms of the sugar to form a second ring.

[0041] As used herein, “mismatch” or “non-complementary” means a nucleobase of a first oligonucleotide that is not complementary with the corresponding nucleobase of a second oligonucleotide or target nucleic acid when the first and second oligonucleotide are aligned.

[0042] As used herein, “motif” means the pattern of unmodified and/or modified sugar moieties, nucleobases, and/or internucleoside linkages, in an oligonucleotide.

[0043] As used herein, “neurological condition” means a condition of the brain, central nervous system, peripheral nervous system, or combination thereof. A neurological condition may be marked by at least one of neuronal malfunction, neuronal damage, and neuronal death. A neurological condition may comprise decreased motor function. A neurological condition may comprise decreased motor control.

[0044] As used herein, “nucleobase” means an unmodified nucleobase or a modified nucleobase. As used herein an “unmodified nucleobase” is adenine (A), thymine (T), cytosine (C), uracil (U), or guanine (G). As used herein, a “modified nucleobase” is a group of atoms other than unmodified A, T, C, U, or G capable of pairing with at least one unmodified nucleobase. A “5-methyl cytosine” is a modified nucleobase. A universal base is a modified nucleobase that can pair with any one of the five unmodified nucleobases. As used herein, “nucleobase sequence” means the order of contiguous nucleobases in a nucleic acid or oligonucleotide independent of any sugar or internucleoside linkage modification.

[0045] As used herein, “nucleoside” means a compound comprising a nucleobase and a sugar moiety. The nucleobase and sugar moiety are each, independently, unmodified or modified. As used herein, “modified nucleoside” means a nucleoside comprising a modified nucleobase and/or a modified sugar moiety. Modified nucleosides include abasic nucleosides, which lack a nucleobase. “Linked nucleosides” are nucleosides that are connected in a contiguous sequence (i.e., no additional nucleosides are presented between those that are linked).

[0046] As used herein, “oligomeric compound” means an oligonucleotide and optionally one or more additional features, such as a conjugate group or terminal group. An oligomeric compound may be paired with a second oligomeric compound that is complementary to the first oligomeric compound or may be unpaired. A “singled-stranded oligomeric compound” is an unpaired oligomeric compound. The term “oligomeric duplex” means a duplex formed by two oligomeric compounds having complementary nucleobase sequences. Each oligomeric compound of an oligomeric duplex may be referred to as a “duplexed oligomeric compound.”

[0047] As used herein, “oligonucleotide” means a strand of linked nucleosides connected via internucleoside linkages, wherein each nucleoside and internucleoside linkage may be modified or unmodified. Unless otherwise indicated, oligonucleotides consist of 8-50 linked nucleosides. As used herein, “modified oligonucleotide” means an oligonucleotide, wherein at least one nucleoside or internucleoside linkage is modified. As used herein, “unmodified oligonucleotide” means an oligonucleotide that does not comprise any nucleoside modifications or internucleoside modifications.

[0048] As used herein, “pharmaceutically acceptable carrier or diluent” means any substance suitable for use in administering to a subject. Certain such carriers enable pharmaceutical compositions to be formulated as, for example, tablets, pills, dragees, capsules, liquids, gels, syrups, slurries, suspension and lozenges for the oral ingestion by a subject. In certain embodiments, a pharmaceutically acceptable carrier or diluent is sterile water, sterile saline, sterile buffer solution or sterile artificial cerebrospinal fluid.

[0049] As used herein “pharmaceutically acceptable salts” means physiologically and pharmaceutically acceptable salts of compounds. Pharmaceutically acceptable salts retain the desired biological activity of the parent compound and do not impart undesired toxicological effects thereto.

[0050] As used herein “pharmaceutical composition” means a mixture of substances suitable for administering to a subject. For example, a pharmaceutical composition may comprise an oligomeric compound and a sterile aqueous solution. In certain embodiments, a pharmaceutical composition shows activity in a free uptake assay in certain cell lines.

[0051] As used herein “prodrug” means a therapeutic agent in a form outside the body that is converted to a different form within a subject or cells thereof. Typically, conversion of a prodrug within the subject is facilitated by the action of an enzymes (e.g., endogenous or viral enzyme) or chemicals present in cells or tissues and/or by physiologic conditions.

[0052] As used herein, “reducing or inhibiting the amount or activity” refers to a reduction or blockade of the transcriptional expression or activity relative to the transcriptional expression or activity in an untreated or control sample and does not necessarily indicate a total elimination of transcriptional expression or activity.

[0053] As used herein, “RNA” means an RNA transcript and includes pre-mRNA and mature mRNA unless otherwise specified.

[0054] As used herein, “RNAi compound” means an antisense compound that acts, at least in part, through RISC or Ago2 to modulate a target nucleic acid and/or protein encoded by a target nucleic acid. RNAi compounds include, but are not limited to double-stranded siRNA, single-stranded RNA (ssRNA), and microRNA, including microRNA mimics. In certain embodiments, an RNAi compound modulates the amount, activity, and/or splicing of a target nucleic acid. The term RNAi compound excludes antisense compounds that act through RNase H.

[0055] As used herein, “self-complementary” in reference to an oligonucleotide means an oligonucleotide that at least partially hybridizes to itself.

[0056] As used herein, “standard cell assay” means the assay described in Example 1 and reasonable variations thereof.

[0057] As used herein, “stereorandom” in the context of a population of molecules of identical molecular formula means a chiral center having a random stereochemical configuration. For example, in a population of molecules comprising a stereorandom chiral center, the number of molecules having the (S) configuration of the stereorandom chiral center may be but is not necessarily the same as the number of molecules having the (R) configuration of the stereorandom chiral center. The stereochemical configuration of a chiral center is considered random when it is the result of a synthetic method that is not designed to control the stereochemical configuration. In certain embodiments, a stereorandom chiral center is a stereorandom phosphorothioate internucleoside linkage.

[0058] As used herein, “subject” means a human or non-human animal. In certain embodiments, the subject is a human.

[0059] As used herein, “sugar moiety” means an unmodified sugar moiety or a modified sugar moiety. As used herein, “unmodified sugar moiety” means a 2′-OH(H) ribosyl moiety, as found in RNA (an “unmodified RNA sugar moiety”), or a 2′-H(H) deoxyribosyl moiety, as found in DNA (an “unmodified DNA sugar moiety”). Unmodified sugar moieties have one hydrogen at each of the 1′, 3′, and 4′ positions, an oxygen at the 3′ position, and two hydrogens at the 5′ position. As used herein, “modified sugar moiety” or “modified sugar” means a modified furanosyl sugar moiety or a sugar surrogate.

[0060] As used herein, “sugar surrogate” means a modified sugar moiety having other than a furanosyl moiety that can link a nucleobase to another group, such as an internucleoside linkage, conjugate group, or terminal group in an oligonucleotide. Modified nucleosides comprising sugar surrogates can be incorporated into one or more positions within an oligonucleotide and such oligonucleotides are capable of hybridizing to complementary oligomeric compounds or nucleic acids.

[0061] As used herein, “symptom or hallmark” means any physical feature or test result that indicates the existence or extent of a disease or disorder. In certain embodiments, a symptom is apparent to a subject or to a medical professional examining or testing said subject. In certain embodiments, a hallmark is apparent upon invasive diagnostic testing, including, but not limited to, post-mortem tests.

[0062] As used herein, “target nucleic acid” and “target RNA” mean a nucleic acid that an antisense compound is designed to affect.

[0063] As used herein, “target region” means a portion of a target nucleic acid to which an oligomeric compound is designed to hybridize.

[0064] As used herein, “terminal group” means a chemical group or group of atoms that is covalently linked to a terminus of an oligonucleotide.

[0065] As used herein, “therapeutically effective amount” means an amount of a pharmaceutical agent that provides a therapeutic benefit to a subject. For example, a therapeutically effective amount improves a symptom or hallmark of a disease.

### Certain Embodiments

[0066] The present disclosure provides the following non-limiting numbered embodiments:

[0067] Embodiment 1. An oligomeric compound comprising a modified oligonucleotide consisting of 12 to 50 linked nucleosides wherein the nucleobase sequence of the modified oligonucleotide is at least 90% complementary to an equal length portion of a KCNT1 nucleic acid, and wherein the modified oligonucleotide comprises at least one modification selected from a modified sugar moiety and a modified internucleoside linkage.

[0068] Embodiment 2. An oligomeric compound comprising a modified oligonucleotide consisting of 12 to 50 linked nucleosides and having a nucleobase sequence comprising at least 8, 9, 10, 11, 12, 13, 14, 15, 16, 17, 18, 19, or 20 contiguous nucleobases of any of SEQ ID NOS: 21-2939.

[0069] Embodiment 3. An oligomeric compound comprising a modified oligonucleotide consisting of 12 to 50 linked nucleosides and having a nucleobase sequence comprising at least 8, at least 9, at least 10, at least 11, at least 12, at least 13, at least 14, at least 15, at least 16, at least 17, at least 18, at least 19, or at least 20 contiguous nucleobases complementary to:

[0070] an equal length portion of nucleobases 24523-24561 of SEQ ID NO: 2,

[0071] an equal length portion of nucleobases 27568-27603 of SEQ ID NO: 2,

[0072] an equal length portion of nucleobases 30772-30811 of SEQ ID NO: 2,

[0073] an equal length portion of nucleobases 54372-54428 of SEQ ID NO: 2,

[0074] an equal length portion of nucleobases 55785-55818 of SEQ ID NO: 2,

[0075] an equal length portion of nucleobases 56048-56073 of SEQ ID NO: 2,

[0076] an equal length portion of nucleobases 56319-56349 of SEQ ID NO: 2,

[0077] an equal length portion of nucleobases 57683-57710 of SEQ ID NO: 2,

[0078] an equal length portion of nucleobases 61117-61153 of SEQ ID NO: 2,

[0079] an equal length portion of nucleobases 71033-71060 of SEQ ID NO: 2,

[0080] an equal length portion of nucleobases 87135-87174 of SEQ ID NO: 2,

[0081] an equal length portion of nucleobases 92109-92149 of SEQ ID NO: 2,

[0082] an equal length portion of nucleobases 94221-94280 of SEQ ID NO: 2,

[0083] an equal length portion of nucleobases 94352-94380 of SEQ ID NO: 2,

[0084] an equal length portion of nucleobases 94993-95036 of SEQ ID NO: 2, or

[0085] an equal length portion of nucleobases 95074-95144 of SEQ ID NO: 2.

[0086] Embodiment 4. An oligomeric compound comprising a modified oligonucleotide consisting of 12 to 50 linked nucleosides and having a nucleobase sequence comprising at least 8, at least 9, at least 10, at least 11, at least 12, at least 13, at least 14, at least 15, at least 16, at least 17, at least 18, at least 19, or at least 20 contiguous nucleobases complementary to:

[0087] an equal length portion of nucleobases 16586-16649 of SEQ ID NO: 2,

[0088] an equal length portion of nucleobases 16586-17823 of SEQ ID NO: 2,

[0089] an equal length portion of nucleobases 16586-18663 of SEQ ID NO: 2,

[0090] an equal length portion of nucleobases 19220-20568 of SEQ ID NO: 2,

[0091] an equal length portion of nucleobases 23003-25391 of SEQ ID NO: 2,

[0092] an equal length portion of nucleobases 27095-29908 of SEQ ID NO: 2,

[0093] an equal length portion of nucleobases 30452-30891 of SEQ ID NO: 2,

[0094] an equal length portion of nucleobases 31773-34427 of SEQ ID NO: 2,

[0095] an equal length portion of nucleobases 38458-47003 of SEQ ID NO: 2,

[0096] an equal length portion of nucleobases 40432-42873 of SEQ ID NO: 2,

[0097] an equal length portion of nucleobases 44414-45718 of SEQ ID NO: 2,

[0098] an equal length portion of nucleobases 52096-52153 of SEQ ID NO: 2,

[0099] an equal length portion of nucleobases 52096-58525 of SEQ ID NO: 2,

[0100] an equal length portion of nucleobases 59308-61697 of SEQ ID NO: 2,

[0101] an equal length portion of nucleobases 60111-61697 of SEQ ID NO: 2,

[0102] an equal length portion of nucleobases 65270-67169 of SEQ ID NO: 2,

[0103] an equal length portion of nucleobases 65270-67150 of SEQ ID NO: 2,

[0104] an equal length portion of nucleobases 67026-67065 of SEQ ID NO: 2,

[0105] an equal length portion of nucleobases 67026-67087 of SEQ ID NO: 2,

[0106] an equal length portion of nucleobases 67648-68527 of SEQ ID NO: 2,

[0107] an equal length portion of nucleobases 67955-67998 of SEQ ID NO: 2,

[0108] an equal length portion of nucleobases 68515-68583 of SEQ ID NO: 2,

[0109] an equal length portion of nucleobases 68538-68592 of SEQ ID NO: 2,

[0110] an equal length portion of nucleobases 68571-70874 of SEQ ID NO: 2,

[0111] an equal length portion of nucleobases 71037-71313 of SEQ ID NO: 2,

[0112] an equal length portion of nucleobases 71037-71184 of SEQ ID NO: 2,

[0113] an equal length portion of nucleobases 72851-72887 of SEQ ID NO: 2,

[0114] an equal length portion of nucleobases 79368-79483 of SEQ ID NO: 2,

[0115] an equal length portion of nucleobases 86554-90150 of SEQ ID NO: 2,

[0116] an equal length portion of nucleobases 88332-88448 of SEQ ID NO: 2,

[0117] an equal length portion of nucleobases 91686-95485 of SEQ ID NO: 2,

[0118] an equal length portion of nucleobases 91686-94431 of SEQ ID NO: 2, or

[0119] an equal length portion of nucleobases 94219-94275 of SEQ ID NO: 2.

[0120] Embodiment 5. The oligomeric compound of any one of embodiments 1-4, wherein the modified oligonucleotide has a nucleobase sequence that is at least 80%, 85%, 90%, 95%, or 100% complementary to an equal length portion of a nucleobase sequence selected from SEQ ID NOS: 1-3 when measured across the entire nucleobase sequence of the modified oligonucleotide.

[0121] Embodiment 6. The oligomeric compound of any one of embodiments 1-5, wherein at least one modified nucleoside comprises a modified sugar moiety.

[0122] Embodiment 7. The oligomeric compound of embodiment 6, wherein the modified sugar moiety comprises a bicyclic sugar moiety.

[0123] Embodiment 8. The oligomeric compound of embodiment 7, wherein the bicyclic sugar moiety comprises a 2′-4′ bridge selected from —O—CH₂—; and —O—CH(CH₃)—.

[0124] Embodiment 9. The oligomeric compound of embodiment 6, wherein the modified sugar moiety comprises a non-bicyclic modified sugar moiety.

[0125] Embodiment 10. The oligomeric compound of embodiment 9, wherein the non-bicyclic modified sugar moiety comprises a 2′-MOE sugar moiety or 2′-OMe sugar moiety.

[0126] Embodiment 11. The oligomeric compound of any one of embodiments 1-5, wherein at least one modified nucleoside comprises a sugar surrogate.

[0127] Embodiment 12. The oligomeric compound of embodiment 11, wherein the sugar surrogate is selected from morpholino and PNA.

[0128] Embodiment 13. The oligomeric compound of any of embodiments 1-12, wherein the modified oligonucleotide has a sugar motif comprising:

[0129] a 5′-region consisting of 1-5 linked 5′-region nucleosides;

[0130] a central region consisting of 6-10 linked central region nucleosides; and

[0131] a 3′-region consisting of 1-5 linked 3′-region nucleosides; wherein

[0132] each of the 5′-region nucleosides and each of the 3′-region nucleosides comprises a modified sugar moiety and each of the central region nucleosides comprises an unmodified 2′-deoxyribosyl sugar moiety.

[0133] Embodiment 14. The oligomeric compound of any one of embodiments 1-13, wherein the modified oligonucleotide comprises at least one modified internucleoside linkage.

[0134] Embodiment 15. The oligomeric compound of embodiment 14, wherein each internucleoside linkage of the modified oligonucleotide is a modified internucleoside linkage.

[0135] Embodiment 16. The oligomeric compound of embodiment 14 or 15 wherein the modified internucleoside linkage is a phosphorothioate internucleoside linkage.

[0136] Embodiment 17. The oligomeric compound of embodiment 14 or 16 wherein the modified oligonucleotide comprises at least one phosphodiester internucleoside linkage.

[0137] Embodiment 18. The oligomeric compound of any of embodiments 14, 16, or 17, wherein each internucleoside linkage is independently selected from a phosphodiester internucleoside linkage or a phosphorothioate internucleoside linkage.

[0138] Embodiment 19. The oligomeric compound of any of embodiments 1-18, wherein the modified oligonucleotide comprises at least one modified nucleobase.

[0139] Embodiment 20. The oligomeric compound of embodiment 19, wherein the modified nucleobase is a 5-methyl cytosine.

[0140] Embodiment 21. The oligomeric compound of any of embodiments 1-20, wherein the modified oligonucleotide consists of 12-30, 12-22, 12-20, 14-20, 15-25, 16-20, 18-22 or 18-20 linked nucleosides.

[0141] Embodiment 22. The oligomeric compound of any of embodiments 1-21, wherein the modified oligonucleotide consists of 20 linked nucleosides.

[0142] Embodiment 23. The oligomeric compound of embodiment 22, wherein the modified oligonucleotide has the internucleoside linkage motif soooossssssssssooss, wherein “s” represents a phosphorothioate internucleoside linkage and “o” represents a phosphodiester internucleoside linkage.

[0143] Embodiment 24. The oligomeric compound of any of embodiments 1-23, consisting of the modified oligonucleotide.

[0144] Embodiment 25. The oligomeric compound of any of embodiments 1-23, comprising a conjugate group comprising a conjugate moiety and a conjugate linker.

[0145] Embodiment 26. The oligomeric compound of embodiment 25, wherein the conjugate group comprises a GalNAc cluster comprising 1-3 GalNAc ligands.

[0146] Embodiment 27. The oligomeric compound of embodiments 25 or 26, wherein the conjugate linker consists of a single bond.

[0147] Embodiment 28. The oligomeric compound of embodiment 25, wherein the conjugate linker is cleavable.

[0148] Embodiment 29. The oligomeric compound of embodiment 28, wherein the conjugate linker comprises 1-3 linker-nucleosides.

[0149] Embodiment 30. The oligomeric compound of any of embodiments 25-29, wherein the conjugate group is attached to the modified oligonucleotide at the 5′-end of the modified oligonucleotide.

[0150] Embodiment 31. The oligomeric compound of any of embodiments 25-29, wherein the conjugate group is attached to the modified oligonucleotide at the 3′-end of the modified oligonucleotide.

[0151] Embodiment 32. The oligomeric compound of any of embodiments 1-31 comprising a terminal group.

[0152] Embodiment 33. The oligomeric compound of any of embodiments 1-32 wherein the oligomeric compound is a singled-stranded oligomeric compound.

[0153] Embodiment 34. The oligomeric compound of any of embodiments 1-28 or 30-31, wherein the oligomeric compound does not comprise linker-nucleosides.

[0154] Embodiment 35. The oligomeric compound of any one of embodiments 1-34, wherein the modified oligonucleotide of the oligomeric compound is a salt, and wherein the salt is a sodium salt or a potassium salt.

[0155] Embodiment 36. An oligomeric duplex comprising an oligomeric compound of any of embodiments 1-32, 34, or 35.

[0156] Embodiment 37. An antisense compound comprising or consisting of an oligomeric compound of any of embodiments 1-35 or an oligomeric duplex of embodiment 36.

[0157] Embodiment 38. A pharmaceutical composition comprising an oligomeric compound of any of embodiments 1-35 or an oligomeric duplex of embodiment 36, and a pharmaceutically acceptable carrier or diluent.

[0158] Embodiment 39. The pharmaceutical composition of embodiment 38, wherein the pharmaceutically acceptable diluent is artificial cerebrospinal fluid or PBS.

[0159] Embodiment 40. The pharmaceutical composition of embodiment 39, wherein the pharmaceutical composition consists essentially of the modified oligonucleotide and artificial cerebrospinal fluid.

[0160] Embodiment 41. A method comprising administering to a subject a pharmaceutical composition of any of embodiments 38-40.

[0161] Embodiment 42. A method of treating a neurological condition comprising administering to an individual having or at risk for developing the neurological condition a therapeutically effective amount of a pharmaceutical composition according to any of embodiments 38-40; and thereby treating the neurological condition.

[0162] Embodiment 43. A method of reducing KCNT1 RNA or KCNT1 protein in the central nervous system of an individual having or at risk for developing a neurological condition comprising administering a therapeutically effective amount of a pharmaceutical composition according to any of embodiments 38-40; and thereby reducing KCNT1 RNA or KCNT1 protein in the central nervous system.

[0163] Embodiment 44. The method of embodiment 42 or 43, wherein the neurological condition comprises encephalopathy.

[0164] Embodiment 45. The method of embodiment 42 or 43, wherein the neurological condition comprises epilepsy.

[0165] Embodiment 46. The method of embodiment 42 or 43, wherein the neurological condition comprises infantile epilepsy.

[0166] Embodiment 47. The method of embodiment 46, wherein the infantile epilepsy is epilepsy of infancy with migrating focal seizures (EIMFS).

[0167] Embodiment 48. The method of embodiment 42 or 43, wherein the neurological condition is autosomal dominant nocturnal frontal lobe epilepsy (ADNFLE).

[0168] Embodiment 49. The method of any of embodiments 42-48, wherein the administering is by intrathecal administration.

[0169] Embodiment 50. The method of any of embodiments 42-49, wherein at least one symptom or hallmark of the neurological condition is ameliorated.

[0170] Embodiment 51. The method of embodiment 50, wherein the symptom or hallmark is selected from seizure, brain damage, demyelination, hypotonia, microcephaly, depression, anxiety, cognitive function.

[0171] Embodiment 52. The method of any of embodiments 42-51, wherein the method prevents or slows disease regression.

[0172] Embodiment 53. A method of reducing KCNT1 RNA in a cell comprising contacting the cell with an oligomeric compound according to any of embodiments 1-35, an oligomeric duplex according to embodiment 36, or an antisense compound according to embodiment 37; and thereby reducing KCNT1 RNA in the cell.

[0173] Embodiment 4. A method of reducing KCNT1 protein in a cell comprising contacting the cell with an oligomeric compound according to any of embodiments 1-35, an oligomeric duplex according to embodiment 36, or an antisense compound according to embodiment 37; and thereby reducing KCNT1 protein in the cell.

[0174] I. Certain Oligonucleotides

[0175] In certain embodiments, provided herein are oligomeric compounds comprising oligonucleotides, which consist of linked nucleosides. Oligonucleotides may be unmodified oligonucleotides (RNA or DNA) or may be modified oligonucleotides. Modified oligonucleotides comprise at least one modification relative to unmodified RNA or DNA. That is, modified oligonucleotides comprise at least one modified nucleoside (comprising a modified sugar moiety and/or a modified nucleobase) and/or at least one modified internucleoside linkage.

[0176] A. Certain Modified Nucleosides

[0177] Modified nucleosides comprise a modified sugar moiety or a modified nucleobase or both a modifed sugar moiety and a modified nucleobase.
[0178] 1. Certain Sugar Moieties

[0179] In certain embodiments, modified sugar moieties are non-bicyclic modified sugar moieties. In certain embodiments, modified sugar moieties are bicyclic or tricyclic sugar moieties. In certain embodiments, modified sugar moieties are sugar surrogates. Such sugar surrogates may comprise one or more substitutions corresponding to those of other types of modified sugar moieties.

[0180] In certain embodiments, modified sugar moieties are non-bicyclic modified sugar moieties comprising a furanosyl ring with one or more substituent groups none of which bridges two atoms of the furanosyl ring to form a bicyclic structure. Such non-bridging substituents may be at any position of the furanosyl, including but not limited to substituents at the 2′, 4′, and/or 5′ positions. In certain embodiments one or more non-bridging substituent of non-bicyclic modified sugar moieties is branched. Examples of 2′-substituent groups suitable for non-bicyclic modified sugar moieties include but are not limited to: 2′-F, 2′-OCH₃ (“OMe” or “O-methyl”), and 2′-O(CH₂)₂OCH₃ (“MOE”). In certain embodiments, 2′-substituent groups are selected from among: halo, allyl, amino, azido, SH, CN, OCN, CF₃, OCF₃, O—C₁-C₁₀ alkoxy, O—C₁-C₁₀ substituted alkoxy, O—C₁-C₁₀ alkyl, O—C₁-C₁₀ substituted alkyl, S-alkyl, N(Rₘ)-alkyl, O-alkenyl, S-alkenyl, N(Rₘ)-alkenyl, O-alkynyl, S-alkynyl, N(Rₘ)-alkynyl, O-alkylenyl-O-alkyl, alkynyl, alkaryl, aralkyl, O-alkaryl, O-aralkyl, O(CH₂)₂SCH₃, O(CH₂)₂ON(Rₘ)(Rₙ) or OCH₂C(═O)—N(Rₘ)(Rₙ), where each Rₘ and Rₙ is, independently, H, an amino protecting group, or substituted or unsubstituted C₁-C₁₀ alkyl, and the 2′-substituent groups described in Cook et al., U.S. Pat. No. 6,531,584; Cook et al., U.S. Pat. No. 5,859,221; and Cook et al., U.S. Pat. No. 6,005,087. Certain embodiments of these 2′-substituent groups can be further substituted with one or more substituent groups independently selected from among: hydroxyl, amino, alkoxy, carboxy, benzyl, phenyl, nitro (NO₂), thiol, thioalkoxy, thioalkyl, halogen, alkyl, aryl, alkenyl and alkynyl. Examples of 4′-substituent groups suitable for non-bicyclic modified sugar moieties include but are not limited to alkoxy (e.g., methoxy), alkyl, and those described in Manoharan et al., WO 2015/106128. Examples of 5′-substituent groups suitable for non-bicyclic modified sugar moieties include but are not limited to: 5-methyl (R or S), 5′-vinyl, and 5′-methoxy. In certain embodiments, non-bicyclic modified sugar moieties comprise more than one non-bridging sugar substituent, for example, 2′-F-5′-methyl sugar moieties and the modified sugar moieties and modified nucleosides described in Migawa et al., WO 2008/101157 and Rajeev et al., US2013/0203836.).

[0181] In certain embodiments, a 2′-substituted non-bicyclic modified nucleoside comprises a sugar moiety comprising a non-bridging 2′-substituent group selected from: F, NH₂, N₃, OCF₃, OCH₃, O(CH₂)₃NH₂, CH₂CH═CH₂, OCH₂CH═CH₂, OCH₂CH₂OCH₃, O(CH₂)₂SCH₃, O(CH₂)₂ON(Rₘ)(Rₙ), O(CH₂)₂O(CH₂)₂N(CH₃)₂, and N-substituted acetamide (OCH₂C(═O)—N(Rₘ)(Rₙ)), where each Rₘ and Rₙ is, independently, H, an amino protecting group, or substituted or unsubstituted C₁-C₁₀ alkyl.

[0182] In certain embodiments, a 2′-substituted nucleoside non-bicyclic modified nucleoside comprises a sugar moiety comprising a non-bridging 2′-substituent group selected from: F, OCF₃, OCH₃, OCH₂CH₂OCH₃, O(CH₂)₂SCH₃, O(CH₂)₂ON(CH₃)₂, O(CH₂)₂O(CH₂)₂N(CH₃)₂, and OCH₂C(═O)—N(H)CH₃ (“NMA”).

[0183] In certain embodiments, a 2′-substituted non-bicyclic modified nucleoside comprises a sugar moiety comprising a non-bridging 2′-substituent group selected from: F, OCH₃, and OCH₂CH₂OCH₃.

[0184] Certain modified sugar moieties comprise a substituent that bridges two atoms of the furanosyl ring to form a second ring, resulting in a bicyclic sugar moiety. In certain such embodiments, the bicyclic sugar moiety comprises a bridge between the 4′ and the 2′ furanose ring atoms. Examples of such 4′ to 2′ bridging sugar substituents include but are not limited to: 4′-CH₂-2′, 4′-(CH₂)₂-2′, 4′-(CH₂)₃-2′, 4′-CH₂—O-2′ (“LNA”), 4′-CH₂—S-2′, 4′-(CH₂)₂—O-2′ (“ENA”), 4′-CH(CH₃)—O-2′ (referred to as “constrained ethyl” or “cEt”), 4′-CH₂—O—CH₂-2′, 4′-CH₂—N(R)-2′, 4′-CH(CH₂OCH₃)—O-2′ (“constrained MOE” or “cMOE”) and analogs thereof (see, e.g., Seth et al., U.S. Pat. No. 7,399,845, Bhat et al., U.S. Pat. No. 7,569,686, Swayze et al., U.S. Pat. No. 7,741,457, and Swayze et al., U.S. Pat. No. 8,022,193), 4′-C(CH₃)(CH₃)—O-2′ and analogs thereof (see, e.g., Seth et al., U.S. Pat. No. 8,278,283), 4′-CH₂—N(OCH₃)-2′ and analogs thereof (see, e.g., Prakash et al., U.S. Pat. No. 8,278,425), 4′-CH₂—O—N(CH₃)-2′ (see, e.g., Allerson et al., U.S. Pat. No. 7,696,345 and Allerson et al., U.S. Pat. No. 8,124,745), 4′-CH₂—C(H)(CH₃)-2′ (see, e.g., Zhou, et al., J Org. Chem., 2009, 74, 118-134), 4′-CH₂—C(═CH₂)-2′ and analogs thereof (see e.g., Seth et al., U.S. Pat. No. 8,278,426), 4′-C(RₐR_{b})—N(R)—O-2′, 4′-C(RₐR_{b})—O—N(R)-2′, 4′-CH₂—O—N(R)-2′, and 4′-CH₂—N(R)—O- 2′, wherein each R, Rₐ, and R_{b} is, independently, H, a protecting group, or C₁-C₁₂ alkyl (see, e.g. Imanishi et al., U.S. Pat. No. 7,427,672).

[0185] In certain embodiments, such 4′ to 2′ bridges independently comprise from 1 to 4 linked groups independently selected from: —[C(Rₐ)(R_{b})]ₙ—, —[C(Rₐ)(R_{b})]ₙ—O—, —C(Rₐ)═C(R_{b})—, —C(Rₐ)═N—, —C(═NRₐ)—, —C(═O)—, —C(═S)—, —O—, —Si(Rₐ)₂—, —S(═O)ₓ—, and —N(Rₐ)—;

[0186] wherein:

[0187] x is 0, 1, or 2;

[0188] n is 1, 2, 3, or 4;

[0189] each Rₐ and R_{b} is, independently, H, a protecting group, hydroxyl, C₁-C₁₂ alkyl, substituted C₁-C₁₂ alkyl, C₂-C₁₂ alkenyl, substituted C₂-C₁₂ alkenyl, C₂-C₁₂ alkynyl, substituted C₂-C₁₂ alkynyl, C₅-C₂₀ aryl, substituted C₅-C₂₀ aryl, heterocycle radical, substituted heterocycle radical, heteroaryl, substituted heteroaryl, C₅-C₇ alicyclic radical, substituted C₅-C₇ alicyclic radical, halogen, OJ₁, NJ₁J₂, SJ₁, N₃, COOJ₁, acyl (C(═O)—H), substituted acyl, CN, sulfonyl (S(═O)₂-J₁), or sulfoxyl (S(═O)-J₁); and

[0190] each J₁ and J₂ is, independently, H, C₁-C₁₂ alkyl, substituted C₁-C₁₂ alkyl, C₂-C₁₂ alkenyl, substituted C₂-C₁₂ alkenyl, C₂-C₁₂ alkynyl, substituted C₂-C₁₂ alkynyl, C₅-C₂₀ aryl, substituted C₅-C₂₀ aryl, acyl (C(═O)—H), substituted acyl, a heterocycle radical, a substituted heterocycle radical, C₁-C₁₂ aminoalkyl, substituted C₁-C₁₂ aminoalkyl, or a protecting group.

[0191] Additional bicyclic sugar moieties are known in the art, see, for example: Freier et al., Nucleic Acids Research, 1997, 25(22), 4429-4443, Albaek et al., J Org. Chem., 2006, 71, 7731-7740, Singh et al., Chem. Commun., 1998, 4, 455-456; Koshkin et al., Tetrahedron, 1998, 54, 3607-3630; Kumar et al., Bioorg. Med. Chem. Lett., 1998, 8, 2219-2222; Singh et al., J Org. Chem., 1998, 63, 10035-10039; Srivastava et al., J Am. Chem. Soc., 2007, 129, 8362-8379; Wengel et a., U.S. Pat. No. 7,053,207; Imanishi et al., U.S. Pat. No. 6,268,490; Imanishi et al. U.S. Pat. No. 6,770,748; Imanishi et al., U.S. RE44,779; Wengel et al., U.S. Pat. No. 6,794,499; Wengel et al., U.S. Pat. No. 6,670,461; Wengel et al., U.S. Pat. No. 7,034,133; Wengel et al., U.S. Pat. No. 8,080,644; Wengel et al., U.S. Pat. No. 8,034,909; Wengel et al., U.S. Pat. No. 8,153,365; Wengel et al., U.S. Pat. No. 7,572,582; and Ramasamy et al., U.S. Pat. No. 6,525,191; Torsten et al., WO 2004/106356; Wengel et al., WO 1999/014226; Seth et al., WO 2007/134181; Seth et al., U.S. Pat. No. 7,547,684; Seth et al., U.S. Pat. No. 7,666,854; Seth et al., U.S. Pat. No. 8,088,746; Seth et al., U.S. Pat. No. 7,750,131; Seth et al., U.S. Pat. No. 8,030,467; Seth et al., U.S. Pat. No. 8,268,980; Seth et al., U.S. Pat. No. 8,546,556; Seth et al., U.S. Pat. No. 8,530,640; Migawa et al., U.S. Pat. No. 9,012,421; Seth et al., U.S. Pat. No. 8,501,805; and U.S. Patent Publication Nos. Allerson et al., US2008/0039618 and Migawa et al., US2015/0191727.

[0192] In certain embodiments, bicyclic sugar moieties and nucleosides incorporating such bicyclic sugar moieties are further defined by isomeric configuration. For example, an LNA nucleoside (described herein) may be in the α-L configuration or in the β-D configuration.

[chemical structure]

α-L-methyleneoxy (4′-CH₂—O-2′) or α-L-LNA bicyclic nucleosides have been incorporated into oligonucleotides that showed antisense activity (Frieden et al., Nucleic Acids Research, 2003, 21, 6365-6372). Herein, general descriptions of bicyclic nucleosides include both isomeric configurations. When the positions of specific bicyclic nucleosides (e.g., LNA or cEt) are identified in exemplified embodiments herein, they are in the β-D configuration, unless otherwise specified.

[0193] In certain embodiments, modified sugar moieties comprise one or more non-bridging sugar substituent and one or more bridging sugar substituent (e.g., 5′-substituted and 4′-2′ bridged sugars).

[0194] In certain embodiments, modified sugar moieties are sugar surrogates. In certain such embodiments, the oxygen atom of the sugar moiety is replaced, e.g., with a sulfur, carbon or nitrogen atom. In certain such embodiments, such modified sugar moieties also comprise bridging and/or non-bridging substituents as described herein. For example, certain sugar surrogates comprise a 4′-sulfur atom and a substitution at the 2′-position (see, e.g., Bhat et al., U.S. Pat. No. 7,875,733 and Bhat et al., U.S. Pat. No. 7,939,677) and/or the 5′ position.

[0195] In certain embodiments, sugar surrogates comprise rings having other than 5 atoms. For example, in certain embodiments, a sugar surrogate comprises a six-membered tetrahydropyran (“THP”). Such tetrahydropyrans may be further modified or substituted. Nucleosides comprising such modified tetrahydropyrans include but are not limited to hexitol nucleic acid (“HNA”), anitol nucleic acid (“ANA”), manitol nucleic acid (“MNA”) (see, e.g., Leumann, C J. Bioorg. & Med. Chem. 2002, 10, 841-854), fluoro HNA:

[chemical structure]

(“F-HNA”, see e.g. Swayze et al., U.S. Pat. No. 8,088,904; Swayze et al., U.S. Pat. No. 8,440,803; Swayze et al., U.S. Pat. No. 8,796,437; and Swayze et al., U.S. Pat. No. 9,005,906; F-HNA can also be referred to as a F-THP or 3′-fluoro tetrahydropyran), and nucleosides comprising additional modified THP compounds having the formula:

[chemical structure]

wherein, independently, for each of said modified THP nucleoside:

[0196] Bx is a nucleobase moiety;

[0197] T₃ and T₄ are each, independently, an internucleoside linking group linking the modified THP nucleoside to the remainder of an oligonucleotide or one of T₃ and T₄ is an internucleoside linking group linking the modified THP nucleoside to the remainder of an oligonucleotide and the other of T₃ and T₄ is H, a hydroxyl protecting group, a linked conjugate group, or a 5′ or 3′-terminal group;

q₁, q₂, q₃, q₄, q₅, q₆ and q₇ are each, independently, H, C₁-C₆ alkyl, substituted C₁-C₆ alkyl, C₂-C₆ alkenyl, substituted C₂-C₆ alkenyl, C₂-C₆ alkynyl, or substituted C₂-C₆ alkynyl; and

[0198] each of R₁ and R₂ is independently selected from among: hydrogen, halogen, substituted or unsubstituted alkoxy, NJ₁J₂, SJ₁, N₃, OC(═X)J₁, OC(═X)NJ₁J₂, NJ₃C(═X) NJ₁J₂, and CN, wherein X is O, S or NJ₁, and each J₁, J₂, and J₃ is, independently, H or C₁-C₆ alkyl.

[0199] In certain embodiments, modified THP nucleosides are provided wherein q₁, q₂, q₃, q₄, q₅, q₆ and q₇ are each H. In certain embodiments, at least one of q₁, q₂, q₃, q₄, q₅, q₆ and q₇ is other than H. In certain embodiments, at least one of q₁, q₂, q₃, q₄, q₅, q₆ and q₇ is methyl. In certain embodiments, modified THP nucleosides are provided wherein one of R₁ and R₂ is F. In certain embodiments, R₁ is F and R₂ is H, in certain embodiments, R₁ is methoxy and R₂ is H, and in certain embodiments, R₁ is methoxyethoxy and R₂ is H.

[0200] In certain embodiments, sugar surrogates comprise rings having more than 5 atoms and more than one heteroatom. For example, nucleosides comprising morpholino sugar moieties and their use in oligonucleotides have been reported (see, e.g., Braasch et al., Biochemistry, 2002, 41, 4503-4510 and Summerton et al., U.S. Pat. No. 5,698,685; Summerton et al., U.S. Pat. No. 5,166,315; Summerton et al., U.S. Pat. No. 5,185,444; and Summerton et al., U.S. Pat. No. 5,034,506). As used here, the term “morpholino” means a sugar surrogate having the following structure:

[chemical structure]

In certain embodiments, morpholinos may be modified, for example by adding or altering various substituent groups from the above morpholino structure. Such sugar surrogates are referred to herein as “modified morpholinos.”

[0201] In certain embodiments, sugar surrogates comprise acyclic moieites. Examples of nucleosides and oligonucleotides comprising such acyclic sugar surrogates include but are not limited to: peptide nucleic acid (“PNA”), acyclic butyl nucleic acid (see, e.g., Kumar et al., Org. Biomol. Chem., 2013, 11, 5853-5865), and nucleosides and oligonucleotides described in Manoharan et al., WO2011/133876.

[0202] Many other bicyclic and tricyclic sugar and sugar surrogate ring systems are known in the art that can be used in modified nucleosides.

[0203] 2. Certain Modified Nucleobases

[0204] In certain embodiments, modified oligonucleotides comprise one or more nucleoside comprising an unmodified nucleobase. In certain embodiments, modified oligonucleotides comprise one or more nucleoside comprising a modified nucleobase. In certain embodiments, modified oligonucleotides comprise one or more nucleoside that does not comprise a nucleobase, referred to as an abasic nucleoside.

[0205] In certain embodiments, modified nucleobases are selected from: 5-substituted pyrimidines, 6-azapyrimidines, alkyl or alkynyl substituted pyrimidines, alkyl substituted purines, and N-2, N-6 and 0-6 substituted purines. In certain embodiments, modified nucleobases are selected from: 2-aminopropyladenine, 5-hydroxymethyl cytosine, xanthine, hypoxanthine, 2-aminoadenine, 6-N-methylguanine, 6-N-methyladenine, 2-propyladenine, 2-thiouracil, 2-thiothymine and 2-thiocytosine, 5-propynyl (—C≡C—CH₃) uracil, 5-propynylcytosine, 6-azouracil, 6-azocytosine, 6-azothymine, 5-ribosyluracil (pseudouracil), 4-thiouracil, 8-halo, 8-amino, 8-thiol, 8-thioalkyl, 8-hydroxyl, 8-aza and other 8-substituted purines, 5-halo, particularly 5-bromo, 5-trifluoromethyl, 5-halouracil, and 5-halocytosine, 7-methylguanine, 7-methyladenine, 2-F-adenine, 2-aminoadenine, 7-deazaguanine, 7-deazaadenine, 3-deazaguanine, 3-deazaadenine, 6-N-benzoyladenine, 2-N-isobutyrylguanine, 4-N-benzoylcytosine, 4-N-benzoyluracil, 5-methyl 4-N-benzoylcytosine, 5-methyl 4-N-benzoyluracil, universal bases, hydrophobic bases, promiscuous bases, size-expanded bases, and fluorinated bases. Further modified nucleobases include tricyclic pyrimidines, such as 1,3-diazaphenoxazine-2-one, 1,3-diazaphenothiazine-2-one and 9-(2-aminoethoxy)-1,3-diazaphenoxazine-2-one (G-clamp). Modified nucleobases may also include those in which the purine or pyrimidine base is replaced with other heterocycles, for example 7-deaza-adenine, 7-deazaguanosine, 2-aminopyridine and 2-pyridone. Further nucleobases include those disclosed in Merigan et al., U.S. Pat. No. 3,687,808, those disclosed in The Concise Encyclopedia Of Polymer Science And Engineering, Kroschwitz, J. I., Ed., John Wiley & Sons, 1990, 858-859; Englisch et al., Angewandte Chemie, International Edition, 1991, 30, 613; Sanghvi, Y. S., Chapter 15, Antisense Research and Applications, Crooke, S. T. and Lebleu, B., Eds., CRC Press, 1993, 273-288; and those disclosed in Chapters 6 and 15, Antisense Drug Technology, Crooke S. T., Ed., CRC Press, 2008, 163-166 and 442-443.

[0206] Publications that teach the preparation of certain of the above noted modified nucleobases as well as other modified nucleobases include without limitation, Manoharan et al., US2003/0158403; Manoharan et al., US2003/0175906; Dinh et al., U.S. Pat. No. 4,845,205; Spielvogel et al., U.S. Pat. No. 5,130,302; Rogers et al., U.S. Pat. No. 5,134,066; Bischofberger et al., U.S. Pat. No. 5,175,273; Urdea et al., U.S. Pat. No. 5,367,066; Benner et al., U.S. Pat. No. 5,432,272; Matteucci et al., U.S. Pat. No. 5,434,257; Gmeiner et al., U.S. Pat. No. 5,457,187; Cook et al., U.S. Pat. No. 5,459,255; Froehler et al., U.S. Pat. No. 5,484,908; Matteucci et al., U.S. Pat. No. 5,502,177; Hawkins et al., U.S. Pat. No. 5,525,711; Haralambidis et al., U.S. Pat. No. 5,552,540; Cook et al., U.S. Pat. No. 5,587,469; Froehler et al., U.S. Pat. No. 5,594,121; Switzer et al., U.S. Pat. No. 5,596,091; Cook et al., U.S. Pat. No. 5,614,617; Froehler et al., U.S. Pat. No. 5,645,985; Cook et al., U.S. Pat. No. 5,681,941; Cook et al., U.S. Pat. No. 5,811,534; Cook et al., U.S. Pat. No. 5,750,692; Cook et al., U.S. Pat. No. 5,948,903; Cook et al., U.S. Pat. No. 5,587,470; Cook et al., U.S. Pat. No. 5,457,191; Matteucci et al., U.S. Pat. No. 5,763,588; Froehler et al., U.S. Pat. No. 5,830,653; Cook et al., U.S. Pat. No. 5,808,027; Cook et al., 6,166,199; and Matteucci et al., U.S. Pat. No. 6,005,096.

[0207] 3. Certain Modified Internucleoside Linkages

[0208] In certain embodiments, nucleosides of modified oligonucleotides may be linked together using any internucleoside linkage. The two main classes of internucleoside linking groups are defined by the presence or absence of a phosphorus atom. Representative phosphorus-containing internucleoside linkages include but are not limited to phosphates, which contain a phosphodiester bond (“P═O”) (also referred to as unmodified or naturally occurring linkages), phosphotriesters, methylphosphonates, phosphoramidates, and phosphorothioates (“P═S”), and phosphorodithioates (“HS—P═S”). Representative non-phosphorus containing internucleoside linking groups include but are not limited to methylenemethylimino (—CH₂—N(CH₃)—O—CH₂—), thiodiester, thionocarbamate (—O—C(═O)(NH)—S—); siloxane (—O—SiH₂—O—); and N,N′-dimethylhydrazine (—CH₂—N(CH₃)—N(CH₃)—). Modified internucleoside linkages, compared to naturally occurring phosphate linkages, can be used to alter, typically increase, nuclease resistance of the oligonucleotide. In certain embodiments, internucleoside linkages having a chiral atom can be prepared as a racemic mixture, or as separate enantiomers. Methods of preparation of phosphorous-containing and non-phosphorous-containing internucleoside linkages are well known to those skilled in the art.

[0209] Representative internucleoside linkages having a chiral center include but are not limited to alkylphosphonates and phosphorothioates. Modified oligonucleotides comprising internucleoside linkages having a chiral center can be prepared as populations of modified oligonucleotides comprising stereorandom internucleoside linkages, or as populations of modified oligonucleotides comprising phosphorothioate linkages in particular stereochemical configurations. In certain embodiments, populations of modified oligonucleotides comprise phosphorothioate internucleoside linkages wherein all of the phosphorothioate internucleoside linkages are stereorandom. Such modified oligonucleotides can be generated using synthetic methods that result in random selection of the stereochemical configuration of each phosphorothioate linkage. Nonetheless, as is well understood by those of skill in the art, each individual phosphorothioate of each individual oligonucleotide molecule has a defined stereoconfiguration. In certain embodiments, populations of modified oligonucleotides are enriched for modified oligonucleotides comprising one or more particular phosphorothioate internucleoside linkages in a particular, independently selected stereochemical configuration. In certain embodiments, the particular configuration of the particular phosphorothioate linkage is present in at least 65% of the molecules in the population. In certain embodiments, the particular configuration of the particular phosphorothioate linkage is present in at least 70% of the molecules in the population. In certain embodiments, the particular configuration of the particular phosphorothioate linkage is present in at least 80% of the molecules in the population. In certain embodiments, the particular configuration of the particular phosphorothioate linkage is present in at least 90% of the molecules in the population. In certain embodiments, the particular configuration of the particular phosphorothioate linkage is present in at least 99% of the molecules in the population. Such chirally enriched populations of modified oligonucleotides can be generated using synthetic methods known in the art, e.g., methods described in Oka et al., JACS 125, 8307 (2003), Wan et al. Nuc. Acid. Res. 42, 13456 (2014), and WO 2017/015555. In certain embodiments, a population of modified oligonucleotides is enriched for modified oligonucleotides having at least one indicated phosphorothioate in the (Sp) configuration. In certain embodiments, a population of modified oligonucleotides is enriched for modified oligonucleotides having at least one phosphorothioate in the (Rp) configuration. In certain embodiments, modified oligonucleotides comprising (Rp) and/or (Sp) phosphorothioates comprise one or more of the following formulas, respectively, wherein “B” indicates a nucleobase:

[chemical structure]

Unless otherwise indicated, chiral internucleoside linkages of modified oligonucleotides described herein can be stereorandom or in a particular stereochemical configuration.

[0210] Neutral internucleoside linkages include, without limitation, phosphotriesters, methylphosphonates, MMI (3′-CH₂—N(CH₃)—O-5′), amide-3 (3′-CH₂—C(═O)—N(H)-5′), amide-4 (3′-CH₂—N(H)—C(═O)-5′), formacetal (3′-O—CH₂—O-5′), methoxypropyl, and thioformacetal (3′-S—CH₂—O-5′). Further neutral internucleoside linkages include nonionic linkages comprising siloxane (dialkylsiloxane), carboxylate ester, carboxamide, sulfide, sulfonate ester and amides (See for example: Carbohydrate Modifications in Antisense Research; Y. S. Sanghvi and P. D. Cook, Eds., ACS Symposium Series 580; Chapters 3 and 4, 40-65). Further neutral internucleoside linkages include nonionic linkages comprising mixed N, O, S and CH₂ component parts.

[0211] B. Certain Motifs

[0212] In certain embodiments, modified oligonucleotides comprise one or more modified nucleosides comprising a modified sugar moiety. In certain embodiments, modified oligonucleotides comprise one or more modified nucleosides comprising a modified nucleobase. In certain embodiments, modified oligonucleotides comprise one or more modified internucleoside linkage. In such embodiments, the modified, unmodified, and differently modified sugar moieties, nucleobases, and/or internucleoside linkages of a modified oligonucleotide define a pattern or motif. In certain embodiments, the patterns of sugar moieties, nucleobases, and internucleoside linkages are each independent of one another. Thus, a modified oligonucleotide may be described by its sugar motif, nucleobase motif and/or internucleoside linkage motif (as used herein, nucleobase motif describes the modifications to the nucleobases independent of the sequence of nucleobases).

[0213] 1. Certain Sugar Motifs

[0214] In certain embodiments, oligonucleotides comprise one or more type of modified sugar and/or unmodified sugar moiety arranged along the oligonucleotide or region thereof in a defined pattern or sugar motif. In certain instances, such sugar motifs include but are not limited to any of the sugar modifications discussed herein.

[0215] In certain embodiments, modified oligonucleotides comprise or consist of a region having a gapmer motif, which is defined by two external regions or “wings” and a central or internal region or “gap.” The three regions of a gapmer motif (the 5′-wing, the gap, and the 3′-wing) form a contiguous sequence of nucleosides wherein at least some of the sugar moieties of the nucleosides of each of the wings differ from at least some of the sugar moieties of the nucleosides of the gap. Specifically, at least the sugar moieties of the nucleosides of each wing that are closest to the gap (the 3′-most nucleoside of the 5′-wing and the 5′-most nucleoside of the 3′-wing) differ from the sugar moiety of the neighboring gap nucleosides, thus defining the boundary between the wings and the gap (i.e., the wing/gap junction). In certain embodiments, the sugar moieties within the gap are the same as one another. In certain embodiments, the gap includes one or more nucleoside having a sugar moiety that differs from the sugar moiety of one or more other nucleosides of the gap. In certain embodiments, the sugar motifs of the two wings are the same as one another (symmetric gapmer). In certain embodiments, the sugar motif of the 5-wing differs from the sugar motif of the 3-wing (asymmetric gapmer).

[0216] In certain embodiments, the wings of a gapmer comprise 1-5 nucleosides. In certain embodiments, each nucleoside of each wing of a gapmer is a modified nucleoside. In certain embodiments, at least one nucleoside of each wing of a gapmer is a modified nucleoside. In certain embodiments, at least two nucleosides of each wing of a gapmer are modified nucleosides. In certain embodiments, at least three nucleosides of each wing of a gapmer are modified nucleosides. In certain embodiments, at least four nucleosides of each wing of a gapmer are modified nucleosides.

[0217] In certain embodiments, the gap of a gapmer comprises 7-12 nucleosides. In certain embodiments, each nucleoside of the gap of a gapmer is an unmodified 2′-deoxynucleoside. In certain embodiments, at least one nucleoside of the gap of a gapmer is a modified nucleoside.

[0218] In certain embodiments, the gapmer is a deoxy gapmer. In certain embodiments, the nucleosides on the gap side of each wing/gap junction are unmodified 2′-deoxynucleosides and the nucleosides on the wing sides of each wing/gap junction are modified nucleosides. In certain embodiments, each nucleoside of the gap is an unmodified 2′-deoxynucleoside. In certain embodiments, each nucleoside of each wing of a gapmer is a modified nucleoside.

[0219] In certain embodiments, modified oligonucleotides comprise or consist of a region having a fully modified sugar motif. In such embodiments, each nucleoside of the fully modified region of the modified oligonucleotide comprises a modified sugar moiety. In certain embodiments, each nucleoside of the entire modified oligonucleotide comprises a modified sugar moiety. In certain embodiments, modified oligonucleotides comprise or consist of a region having a fully modified sugar motif, wherein each nucleoside within the fully modified region comprises the same modified sugar moiety, referred to herein as a uniformly modified sugar motif. In certain embodiments, a fully modified oligonucleotide is a uniformly modified oligonucleotide. In certain embodiments, each nucleoside of a uniformly modified comprises the same 2′-modification.

[0220] Herein, the lengths (number of nucleosides) of the three regions of a gapmer may be provided using the notation [#of nucleosides in the 5′-wing]-[#of nucleosides in the gap]-[#of nucleosides in the 3′-wing]. Thus, a 5-10-5 gapmer consists of 5 linked nucleosides in each wing and 10 linked nucleosides in the gap. Where such nomenclature is followed by a specific modification, that modification is the modification in each sugar moiety of each wing and the gap nucleosides comprise unmodified deoxynucleosides sugars. Thus, a 5-10-5 MOE gapmer consists of 5 linked MOE modified nucleosides in the 5′-wing, 10 linked deoxynucleosides in the gap, and 5 linked MOE nucleosides in the 3′-wing.

[0221] In certain embodiments, modified oligonucleotides are 5-10-5 MOE gapmers. In certain embodiments, modified oligonucleotides are 3-10-3 BNA gapmers. In certain embodiments, modified oligonucleotides are 3-10-3 cEt gapmers. In certain embodiments, modified oligonucleotides are 3-10-3 LNA gapmers.

[0222] 2. Certain Nucleobase Motifs

[0223] In certain embodiments, oligonucleotides comprise modified and/or unmodified nucleobases arranged along the oligonucleotide or region thereof in a defined pattern or motif. In certain embodiments, each nucleobase is modified. In certain embodiments, none of the nucleobases are modified. In certain embodiments, each purine or each pyrimidine is modified. In certain embodiments, each adenine is modified. In certain embodiments, each guanine is modified. In certain embodiments, each thymine is modified. In certain embodiments, each uracil is modified. In certain embodiments, each cytosine is modified. In certain embodiments, some or all of the cytosine nucleobases in a modified oligonucleotide are 5-methyl cytosines. In certain embodiments, all of the cytosine nucleobases are 5-methyl cytosines and all of the other nucleobases of the modified oligonucleotide are unmodified nucleobases.

[0224] In certain embodiments, modified oligonucleotides comprise a block of modified nucleobases. In certain such embodiments, the block is at the 3′-end of the oligonucleotide. In certain embodiments the block is within 3 nucleosides of the 3′-end of the oligonucleotide. In certain embodiments, the block is at the 5′-end of the oligonucleotide. In certain embodiments the block is within 3 nucleosides of the 5′-end of the oligonucleotide.

[0225] In certain embodiments, oligonucleotides having a gapmer motif comprise a nucleoside comprising a modified nucleobase. In certain such embodiments, one nucleoside comprising a modified nucleobase is in the central gap of an oligonucleotide having a gapmer motif. In certain such embodiments, the sugar moiety of said nucleoside is a 2′-deoxyribosyl moiety. In certain embodiments, the modified nucleobase is selected from: a 2-thiopyrimidine and a 5-propynepyrimidine.

[0226] 3. Certain Internucleoside Linkage Motifs

[0227] In certain embodiments, oligonucleotides comprise modified and/or unmodified internucleoside linkages arranged along the oligonucleotide or region thereof in a defined pattern or motif. In certain embodiments, each internucleoside linking group is a phosphodiester internucleoside linkage (P═O). In certain embodiments, each internucleoside linking group of a modified oligonucleotide is a phosphorothioate internucleoside linkage (P═S). In certain embodiments, each internucleoside linkage of a modified oligonucleotide is independently selected from a phosphorothioate internucleoside linkage and phosphodiester internucleoside linkage. In certain embodiments, each phosphorothioate internucleoside linkage is independently selected from a stereorandom phosphorothioate a (Sp) phosphorothioate, and a (Rp) phosphorothioate. In certain embodiments, the sugar motif of a modified oligonucleotide is a gapmer and the internucleoside linkages within the gap are all modified. In certain such embodiments, some or all of the internucleoside linkages in the wings are unmodified phosphodiester internucleoside linkages. In certain embodiments, the terminal internucleoside linkages are modified. In certain embodiments, the sugar motif of a modified oligonucleotide is a gapmer, and the internucleoside linkage motif comprises at least one phosphodiester internucleoside linkage in at least one wing, wherein the at least one phosphodiester linkage is not a terminal internucleoside linkage, and the remaining internucleoside linkages are phosphorothioate internucleoside linkages. In certain such embodiments, all of the phosphorothioate linkages are stereorandom. In certain embodiments, all of the phosphorothioate linkages in the wings are (Sp) phosphorothioates, and the gap comprises at least one Sp, Sp, Rp motif. In certain embodiments, populations of modified oligonucleotides are enriched for modified oligonucleotides comprising such internucleoside linkage motifs.

[0228] C. Certain Lengths

[0229] It is possible to increase or decrease the length of an oligonucleotide without eliminating activity. For example, in Woolf et al. (Proc. Natl. Acad. Sci. USA 89:7305-7309, 1992), a series of oligonucleotides 13-25 nucleobases in length were tested for their ability to induce cleavage of a target RNA in an oocyte injection model. Oligonucleotides 25 nucleobases in length with 8 or 11 mismatch bases near the ends of the oligonucleotides were able to direct specific cleavage of the target RNA, albeit to a lesser extent than the oligonucleotides that contained no mismatches. Similarly, target specific cleavage was achieved using 13 nucleobase oligonucleotides, including those with 1 or 3 mismatches.

[0230] In certain embodiments, oligonucleotides (including modified oligonucleotides) can have any of a variety of ranges of lengths. In certain embodiments, oligonucleotides consist of X to Y linked nucleosides, where X represents the fewest number of nucleosides in the range and Y represents the largest number nucleosides in the range. In certain such embodiments, X and Y are each independently selected from 8, 9, 10, 11, 12, 13, 14, 15, 16, 17, 18, 19, 20, 21, 22, 23, 24, 25, 26, 27, 28, 29, 30, 31, 32, 33, 34, 35, 36, 37, 38, 39, 40, 41, 42, 43, 44, 45, 46, 47, 48, 49, and 50; provided that X≤Y. For example, in certain embodiments, oligonucleotides consist of 12 to 13, 12 to 14, 12 to 15, 12 to 16, 12 to 17, 12 to 18, 12 to 19, 12 to 20, 12 to 21, 12 to 22, 12 to 23, 12 to 24, 12 to 25, 12 to 26, 12 to 27, 12 to 28, 12 to 29, 12 to 30, 13 to 14, 13 to 15, 13 to 16, 13 to 17, 13 to 18, 13 to 19, 13 to 20, 13 to 21, 13 to 22, 13 to 23, 13 to 24, 13 to 25, 13 to 26, 13 to 27, 13 to 28, 13 to 29, 13 to 30, 14 to 15, 14 to 16, 14 to 17, 14 to 18, 14 to 19, 14 to 20, 14 to 21, 14 to 22, 14 to 23, 14 to 24, 14 to 25, 14 to 26, 14 to 27, 14 to 28, 14 to 29, 14 to 30, 15 to 16, 15 to 17, 15 to 18, 15 to 19, 15 to 20, 15 to 21, 15 to 22, 15 to 23, 15 to 24, 15 to 25, 15 to 26, 15 to 27, 15 to 28, 15 to 29, 15 to 30, 16 to 17, 16 to 18, 16 to 19, 16 to 20, 16 to 21, 16 to 22, 16 to 23, 16 to 24, 16 to 25, 16 to 26, 16 to 27, 16 to 28, 16 to 29, 16 to 30, 17 to 18, 17 to 19, 17 to 20, 17 to 21, 17 to 22, 17 to 23, 17 to 24, 17 to 25, 17 to 26, 17 to 27, 17 to 28, 17 to 29, 17 to 30, 18 to 19, 18 to 20, 18 to 21, 18 to 22, 18 to 23, 18 to 24, 18 to 25, 18 to 26, 18 to 27, 18 to 28, 18 to 29, 18 to 30, 19 to 20, 19 to 21, 19 to 22, 19 to 23, 19 to 24, 19 to 25, 19 to 26, 19 to 29, 19 to 28, 19 to 29, 19 to 30, 20 to 21, 20 to 22, 20 to 23, 20 to 24, 20 to 25, 20 to 26, 20 to 27, 20 to 28, 20 to 29, 20 to 30, 21 to 22, 21 to 23, 21 to 24, 21 to 25, 21 to 26, 21 to 27, 21 to 28, 21 to 29, 21 to 30, 22 to 23, 22 to 24, 22 to 25, 22 to 26, 22 to 27, 22 to 28, 22 to 29, 22 to 30, 23 to 24, 23 to 25, 23 to 26, 23 to 27, 23 to 28, 23 to 29, 23 to 30, 24 to 25, 24 to 26, 24 to 27, 24 to 28, 24 to 29, 24 to 30, 25 to 26, 25 to 27, 25 to 28, 25 to 29, 25 to 30, 26 to 27, 26 to 28, 26 to 29, 26 to 30, 27 to 28, 27 to 29, 27 to 30, 28 to 29, 28 to 30, or 29 to 30 linked nucleosides.

[0231] D. Certain Modified Oligonucleotides

[0232] In certain embodiments, the above modifications (sugar, nucleobase, internucleoside linkage) are incorporated into a modified oligonucleotide. In certain embodiments, modified oligonucleotides are characterized by their modification motifs and overall lengths. In certain embodiments, such parameters are each independent of one another. Thus, unless otherwise indicated, each internucleoside linkage of an oligonucleotide having a gapmer sugar motif may be modified or unmodified and may or may not follow the gapmer modification pattern of the sugar modifications. For example, the internucleoside linkages within the wing regions of a sugar gapmer may be the same or different from one another and may be the same or different from the internucleoside linkages of the gap region of the sugar motif. Likewise, such sugar gapmer oligonucleotides may comprise one or more modified nucleobase independent of the gapmer pattern of the sugar modifications. Unless otherwise indicated, all modifications are independent of nucleobase sequence.

[0233] E. Certain Populations of Modified Oligonucleotides

[0234] Populations of modified oligonucleotides in which all of the modified oligonucleotides of the population have the same molecular formula can be stereorandom populations or chirally enriched populations. All of the chiral centers of all of the modified oligonucleotides are stereorandom in a stereorandom population. In a chirally enriched population, at least one particular chiral center is not stereorandom in the modified oligonucleotides of the population. In certain embodiments, the modified oligonucleotides of a chirally enriched population are enriched for f-D ribosyl sugar moieties, and all of the phosphorothioate internucleoside linkages are stereorandom. In certain embodiments, the modified oligonucleotides of a chirally enriched population are enriched for both β-D ribosyl sugar moieties and at least one, particular phosphorothioate internucleoside linkage in a particular stereochemical configuration.

[0235] F. Nucleobase Sequence

[0236] In certain embodiments, oligonucleotides (unmodified or modified oligonucleotides) are further described by their nucleobase sequence. In certain embodiments oligonucleotides have a nucleobase sequence that is complementary to a second oligonucleotide or an identified reference nucleic acid, such as a target nucleic acid. In certain such embodiments, a region of an oligonucleotide has a nucleobase sequence that is complementary to a second oligonucleotide or an identified reference nucleic acid, such as a target nucleic acid. In certain embodiments, the nucleobase sequence of a region or entire length of an oligonucleotide is at least 50%, at least 60%, at least 70%, at least 80%, at least 85%, at least 90%, at least 95%, or 100% complementary to the second oligonucleotide or nucleic acid, such as a target nucleic acid.

### I. Certain Oligomeric Compounds

[0237] In certain embodiments, provided herein are oligomeric compounds, which consist of an oligonucleotide (modified or unmodified) and optionally one or more conjugate groups and/or terminal groups. Conjugate groups consist of one or more conjugate moiety and a conjugate linker which links the conjugate moiety to the oligonucleotide. Conjugate groups may be attached to either or both ends of an oligonucleotide and/or at any internal position. In certain embodiments, conjugate groups are attached to the 2-position of a nucleoside of a modified oligonucleotide. In certain embodiments, conjugate groups that are attached to either or both ends of an oligonucleotide are terminal groups. In certain such embodiments, conjugate groups or terminal groups are attached at the 3′ and/or 5′-end of oligonucleotides. In certain such embodiments, conjugate groups (or terminal groups) are attached at the 3′-end of oligonucleotides. In certain embodiments, conjugate groups are attached near the 3′-end of oligonucleotides. In certain embodiments, conjugate groups (or terminal groups) are attached at the 5′-end of oligonucleotides. In certain embodiments, conjugate groups are attached near the 5′-end of oligonucleotides.

[0238] Examples of terminal groups include but are not limited to conjugate groups, capping groups, phosphate moieties, protecting groups, modified or unmodified nucleosides, and two or more nucleosides that are independently modified or unmodified.

[0239] A. Certain Conjugate Groups

[0240] In certain embodiments, oligonucleotides are covalently attached to one or more conjugate groups. In certain embodiments, conjugate groups modify one or more properties of the attached oligonucleotide, including but not limited to pharmacodynamics, pharmacokinetics, stability, binding, absorption, tissue distribution, cellular distribution, cellular uptake, charge and clearance. In certain embodiments, conjugate groups impart a new property on the attached oligonucleotide, e.g., fluorophores or reporter groups that enable detection of the oligonucleotide. Certain conjugate groups and conjugate moieties have been described previously, for example: cholesterol moiety (Letsinger et al., Proc. Natl. Acad. Sci. USA, 1989, 86, 6553-6556), cholic acid (Manoharan et al., Bioorg. Med. Chem. Lett., 1994, 4, 1053-1060), a thioether, e.g., hexyl-S-tritylthiol (Manoharan et al., Ann. N. Y. Acad. Sci., 1992, 660, 306-309; Manoharan et al., Bioorg. Med. Chem. Lett., 1993, 3, 2765-2770), a thiocholesterol (Oberhauser et al., Nucl. Acids Res., 1992, 20, 533-538), an aliphatic chain, e.g., do-decan-diol or undecyl residues (Saison-Behmoaras et al., EMBO J, 1991, 10, 1111-1118; Kabanov et al., FEBSLett., 1990, 259, 327-330; Svinarchuk et al., Biochimie, 1993, 75, 49-54), a phospholipid, e.g., di-hexadecyl-rac-glycerol or triethyl-ammonium 1,2-di-O-hexadecyl-rac-glycero-3-H-phosphonate (Manoharan et al., Tetrahedron Lett., 1995, 36, 3651-3654; Shea et al., Nucl. Acids Res., 1990, 18, 3777-3783), a polyamine or a polyethylene glycol chain (Manoharan et al., Nucleosides & Nucleotides, 1995, 14, 969-973), or adamantane acetic acid a palmityl moiety (Mishra et al., Biochim. Biophys. Acta, 1995, 1264, 229-237), an octadecylamine or hexylamino-carbonyl-oxycholesterol moiety (Crooke et al., J Pharmacol. Exp. Ther., 1996, 277, 923-937), a tocopherol group (Nishina et al., Molecular Therapy Nucleic Acids, 2015, 4, e220; and Nishina et al., Molecular Therapy, 2008, 16, 734-740), or a GalNAc cluster (e.g., WO2014/179620).

[0241] 1. Conjugate Moieties

[0242] Conjugate moieties include, without limitation, intercalators, reporter molecules, polyamines, polyamides, peptides, carbohydrates, vitamin moieties, polyethylene glycols, thioethers, polyethers, cholesterols, thiocholesterols, cholic acid moieties, folate, lipids, phospholipids, biotin, phenazine, phenanthridine, anthraquinone, adamantane, acridine, fluoresceins, rhodamines, coumarins, fluorophores, and dyes.

[0243] In certain embodiments, a conjugate moiety comprises an active drug substance, for example, aspirin, warfarin, phenylbutazone, ibuprofen, suprofen, fen-bufen, ketoprofen, (S)-(+)-pranoprofen, carprofen, dansylsarcosine, 2,3,5-triiodobenzoic acid, fingolimod, flufenamic acid, folinic acid, a benzothiadiazide, chlorothiazide, a diazepine, indo-methicin, a barbiturate, a cephalosporin, a sulfa drug, an antidiabetic, an antibacterial or an antibiotic.

[0244] 2. Conjugate Linkers

[0245] Conjugate moieties are attached to oligonucleotides through conjugate linkers. In certain oligomeric compounds, the conjugate linker is a single chemical bond (i.e., the conjugate moiety is attached directly to an oligonucleotide through a single bond). In certain embodiments, the conjugate linker comprises a chain structure, such as a hydrocarbyl chain, or an oligomer of repeating units such as ethylene glycol, nucleosides, or amino acid units.

[0246] In certain embodiments, a conjugate linker comprises one or more groups selected from alkyl, amino, oxo, amide, disulfide, polyethylene glycol, ether, thioether, and hydroxylamino. In certain such embodiments, the conjugate linker comprises groups selected from alkyl, amino, oxo, amide and ether groups. In certain embodiments, the conjugate linker comprises groups selected from alkyl and amide groups. In certain embodiments, the conjugate linker comprises groups selected from alkyl and ether groups. In certain embodiments, the conjugate linker comprises at least one phosphorus moiety. In certain embodiments, the conjugate linker comprises at least one phosphate group. In certain embodiments, the conjugate linker includes at least one neutral linking group.

[0247] In certain embodiments, conjugate linkers, including the conjugate linkers described above, are bifunctional linking moieties, e.g., those known in the art to be useful for attaching conjugate groups to parent compounds, such as the oligonucleotides provided herein. In general, a bifunctional linking moiety comprises at least two functional groups. One of the functional groups is selected to bind to a particular site on a parent compound and the other is selected to bind to a conjugate group. Examples of functional groups used in a bifunctional linking moiety include but are not limited to electrophiles for reacting with nucleophilic groups and nucleophiles for reacting with electrophilic groups. In certain embodiments, bifunctional linking moieties comprise one or more groups selected from amino, hydroxyl, carboxylic acid, thiol, alkyl, alkenyl, and alkynyl.

[0248] Examples of conjugate linkers include but are not limited to pyrrolidine, 8-amino-3,6-dioxaoctanoic acid (ADO), succinimidyl 4-(N-maleimidomethyl) cyclohexane-1-carboxylate (SMCC) and 6-aminohexanoic acid (AHEX or AHA). Other conjugate linkers include but are not limited to substituted or unsubstituted C₅-C₁₀ alkyl, substituted or unsubstituted C₂-C₁₀ alkenyl or substituted or unsubstituted C₂-C₁₀ alkynyl, wherein a nonlimiting list of preferred substituent groups includes hydroxyl, amino, alkoxy, carboxy, benzyl, phenyl, nitro, thiol, thioalkoxy, halogen, alkyl, aryl, alkenyl and alkynyl.

[0249] In certain embodiments, conjugate linkers comprise 1-10 linker-nucleosides. In certain embodiments, conjugate linkers comprise 2-5 linker-nucleosides. In certain embodiments, conjugate linkers comprise exactly 3 linker-nucleosides. In certain embodiments, conjugate linkers comprise the TCA motif. In certain embodiments, such linker-nucleosides are modified nucleosides. In certain embodiments such linker-nucleosides comprise a modified sugar moiety. In certain embodiments, linker-nucleosides are unmodified. In certain embodiments, linker-nucleosides comprise an optionally protected heterocyclic base selected from a purine, substituted purine, pyrimidine or substituted pyrimidine. In certain embodiments, a cleavable moiety is a nucleoside selected from uracil, thymine, cytosine, 4-N-benzoylcytosine, 5-methyl cytosine, 4-N-benzoyl-5-methyl cytosine, adenine, 6-N-benzoyladenine, guanine and 2-N-isobutyrylguanine. It is typically desirable for linker-nucleosides to be cleaved from the oligomeric compound after it reaches a target tissue. Accordingly, linker-nucleosides are typically linked to one another and to the remainder of the oligomeric compound through cleavable bonds. In certain embodiments, such cleavable bonds are phosphodiester bonds.

[0250] Herein, linker-nucleosides are not considered to be part of the oligonucleotide. Accordingly, in embodiments in which an oligomeric compound comprises an oligonucleotide consisting of a specified number or range of linked nucleosides and/or a specified percent complementarity to a reference nucleic acid and the oligomeric compound also comprises a conjugate group comprising a conjugate linker comprising linker-nucleosides, those linker-nucleosides are not counted toward the length of the oligonucleotide and are not used in determining the percent complementarity of the oligonucleotide for the reference nucleic acid. For example, an oligomeric compound may comprise (1) a modified oligonucleotide consisting of 8-30 nucleosides and (2) a conjugate group comprising 1-10 linker-nucleosides that are contiguous with the nucleosides of the modified oligonucleotide. The total number of contiguous linked nucleosides in such an oligomeric compound is more than 30. Alternatively, an oligomeric compound may comprise a modified oligonucleotide consisting of 8-30 nucleosides and no conjugate group. The total number of contiguous linked nucleosides in such an oligomeric compound is no more than 30. Unless otherwise indicated conjugate linkers comprise no more than 10 linker-nucleosides. In certain embodiments, conjugate linkers comprise no more than 5 linker-nucleosides. In certain embodiments, conjugate linkers comprise no more than 3 linker-nucleosides. In certain embodiments, conjugate linkers comprise no more than 2 linker-nucleosides. In certain embodiments, conjugate linkers comprise no more than 1 linker-nucleoside.

[0251] In certain embodiments, it is desirable for a conjugate group to be cleaved from the oligonucleotide. For example, in certain circumstances oligomeric compounds comprising a particular conjugate moiety are better taken up by a particular cell type, but once the oligomeric compound has been taken up, it is desirable that the conjugate group be cleaved to release the unconjugated or parent oligonucleotide. Thus, certain conjugate linkers may comprise one or more cleavable moieties. In certain embodiments, a cleavable moiety is a cleavable bond. In certain embodiments, a cleavable moiety is a group of atoms comprising at least one cleavable bond. In certain embodiments, a cleavable moiety comprises a group of atoms having one, two, three, four, or more than four cleavable bonds. In certain embodiments, a cleavable moiety is selectively cleaved inside a cell or subcellular compartment, such as a lysosome. In certain embodiments, a cleavable moiety is selectively cleaved by endogenous enzymes, such as nucleases.

[0252] In certain embodiments, a cleavable bond is selected from among: an amide, an ester, an ether, one or both esters of a phosphodiester, a phosphate ester, a carbamate, or a disulfide. In certain embodiments, a cleavable bond is one or both of the esters of a phosphodiester. In certain embodiments, a cleavable moiety comprises a phosphate or phosphodiester. In certain embodiments, the cleavable moiety is a phosphate linkage between an oligonucleotide and a conjugate moiety or conjugate group.

[0253] In certain embodiments, a cleavable moiety comprises or consists of one or more linker-nucleosides. In certain such embodiments, the one or more linker-nucleosides are linked to one another and/or to the remainder of the oligomeric compound through cleavable bonds. In certain embodiments, such cleavable bonds are unmodified phosphodiester bonds. In certain embodiments, a cleavable moiety is 2′-deoxynucleoside that is attached to either the 3′ or 5′-terminal nucleoside of an oligonucleotide by a phosphate internucleoside linkage and covalently attached to the remainder of the conjugate linker or conjugate moiety by a phosphate or phosphorothioate linkage. In certain such embodiments, the cleavable moiety is 2′-deoxyadenosine.

[0254] B. Certain Terminal Groups

[0255] In certain embodiments, oligomeric compounds comprise one or more terminal groups. In certain such embodiments, oligomeric compounds comprise a stabilized 5′-phophate. Stabilized 5′-phosphates include, but are not limited to 5′-phosphanates, including, but not limited to 5′-vinylphosphonates. In certain embodiments, terminal groups comprise one or more abasic nucleosides and/or inverted nucleosides. In certain embodiments, terminal groups comprise one or more 2′-linked nucleosides. In certain such embodiments, the 2′-linked nucleoside is an abasic nucleoside.

### III. Oligomeric Duplexes

[0256] In certain embodiments, oligomeric compounds described herein comprise an oligonucleotide, having a nucleobase sequence complementary to that of a target nucleic acid. In certain embodiments, an oligomeric compound is paired with a second oligomeric compound to form an oligomeric duplex. Such oligomeric duplexes comprise a first oligomeric compound having a region complementary to a target nucleic acid and a second oligomeric compound having a region complementary to the first oligomeric compound. In certain embodiments, the first oligomeric compound of an oligomeric duplex comprises or consists of (1) a modified or unmodified oligonucleotide and optionally a conjugate group and (2) a second modified or unmodified oligonucleotide and optionally a conjugate group. Either or both oligomeric compounds of an oligomeric duplex may comprise a conjugate group. The oligonucleotides of each oligomeric compound of an oligomeric duplex may include non-complementary overhanging nucleosides.

### IV. Antisense Activity

[0257] In certain embodiments, oligomeric compounds and oligomeric duplexes are capable of hybridizing to a target nucleic acid, resulting in at least one antisense activity; such oligomeric compounds and oligomeric duplexes are antisense compounds. In certain embodiments, antisense compounds have antisense activity when they reduce or inhibit the amount or activity of a target nucleic acid by 25% or more in the standard cell assay. In certain embodiments, antisense compounds selectively affect one or more target nucleic acid. Such antisense compounds comprise a nucleobase sequence that hybridizes to one or more target nucleic acid, resulting in one or more desired antisense activity and does not hybridize to one or more non-target nucleic acid or does not hybridize to one or more non-target nucleic acid in such a way that results in significant undesired antisense activity.

[0258] In certain antisense activities, hybridization of an antisense compound to a target nucleic acid results in recruitment of a protein that cleaves the target nucleic acid. For example, certain antisense compounds result in RNase H mediated cleavage of the target nucleic acid. RNase H is a cellular endonuclease that cleaves the RNA strand of an RNA:DNA duplex. The DNA in such an RNA:DNA duplex need not be unmodified DNA. In certain embodiments, described herein are antisense compounds that are sufficiently “DNA-like” to elicit RNase H activity. In certain embodiments, one or more non-DNA-like nucleoside in the gap of a gapmer is tolerated.

[0259] In certain antisense activities, an antisense compound or a portion of an antisense compound is loaded into an RNA-induced silencing complex (RISC), ultimately resulting in cleavage of the target nucleic acid. For example, certain antisense compounds result in cleavage of the target nucleic acid by Argonaute. Antisense compounds that are loaded into RISC are RNAi compounds. RNAi compounds may be double-stranded (siRNA) or single-stranded (ssRNA).

[0260] In certain embodiments, hybridization of an antisense compound to a target nucleic acid does not result in recruitment of a protein that cleaves that target nucleic acid. In certain embodiments, hybridization of the antisense compound to the target nucleic acid results in alteration of splicing of the target nucleic acid. In certain embodiments, hybridization of an antisense compound to a target nucleic acid results in inhibition of a binding interaction between the target nucleic acid and a protein or other nucleic acid. In certain embodiments, hybridization of an antisense compound to a target nucleic acid results in alteration of translation of the target nucleic acid.

[0261] Antisense activities may be observed directly or indirectly. In certain embodiments, observation or detection of an antisense activity involves observation or detection of a change in an amount of a target nucleic acid or protein encoded by such target nucleic acid, a change in the ratio of splice variants of a nucleic acid or protein and/or a phenotypic change in a cell or subject.

### V. Certain Target Nucleic Acids

[0262] In certain embodiments, oligomeric compounds comprise or consist of an oligonucleotide comprising a region that is complementary to a target nucleic acid. In certain embodiments, the target nucleic acid is an endogenous RNA molecule. In certain embodiments, the target nucleic acid encodes a protein. In certain such embodiments, the target nucleic acid is selected from: a mature mRNA and a pre-mRNA, including intronic, exonic and untranslated regions. In certain embodiments, the target RNA is a mature mRNA. In certain embodiments, the target nucleic acid is a pre-mRNA. In certain such embodiments, the target region is entirely within an intron. In certain embodiments, the target region spans an intron/exon junction. In certain embodiments, the target region is at least 50% within an intron. In certain embodiments, the target nucleic acid is the RNA transcriptional product of a retrogene. In certain embodiments, the target nucleic acid is a non-coding RNA. In certain such embodiments, the target non-coding RNA is selected from: a long non-coding RNA, a short non-coding RNA, an intronic RNA molecule.

[0263] A. Complementarity/Mismatches to the Target Nucleic Acid

[0264] It is possible to introduce mismatch bases without eliminating activity. For example, Gautschi et al (J. Natl. Cancer Inst. 93:463-471, March 2001) demonstrated the ability of an oligonucleotide having 100% complementarity to the bc1-2 mRNA and having 3 mismatches to the bc1-xL mRNA to reduce the expression of both bc1-2 and bc1-xL in vitro and in vivo. Furthermore, this oligonucleotide demonstrated potent anti-tumor activity in vivo. Maher and Dolnick (Nuc. Acid. Res. 16:3341-3358, 1988) tested a series of tandem 14 nucleobase oligonucleotides, and a 28 and 42 nucleobase oligonucleotides comprised of the sequence of two or three of the tandem oligonucleotides, respectively, for their ability to arrest translation of human DHFR in a rabbit reticulocyte assay. Each of the three 14 nucleobase oligonucleotides alone was able to inhibit translation, albeit at a more modest level than the 28 or 42 nucleobase oligonucleotides.

[0265] In certain embodiments, oligonucleotides are complementary to the target nucleic acid over the entire length of the oligonucleotide. In certain embodiments, oligonucleotides are 99%, 95%, 90%, 85%, or 80% complementary to the target nucleic acid. In certain embodiments, oligonucleotides are at least 80% complementary to the target nucleic acid over the entire length of the oligonucleotide and comprise a region that is 100% or fully complementary to a target nucleic acid. In certain embodiments, the region of full complementarity is from 6 to 20, 10 to 18, or 18 to 20 nucleobases in length.

[0266] In certain embodiments, oligonucleotides comprise one or more mismatched nucleobases relative to the target nucleic acid. In certain embodiments, antisense activity against the target is reduced by such mismatch, but activity against a non-target is reduced by a greater amount. Thus, in certain embodiments selectivity of the oligonucleotide is improved. In certain embodiments, the mismatch is specifically positioned within an oligonucleotide having a gapmer motif. In certain embodiments, the mismatch is at position 1, 2, 3, 4, 5, 6, 7, or 8 from the 5′-end of the gap region. In certain embodiments, the mismatch is at position 9, 8, 7, 6, 5, 4, 3, 2, 1 from the 3′-end of the gap region. In certain embodiments, the mismatch is at position 1, 2, 3, or 4 from the 5′-end of the wing region. In certain embodiments, the mismatch is at position 4, 3, 2, or 1 from the 3′-end of the wing region.

[0267] B. KCNT1

[0268] In certain embodiments, oligomeric compounds comprise or consist of an oligonucleotide comprising a region that is complementary to a KCNT1 nucleic acid. In certain embodiments, the KCNT1 nucleic acid has the sequence set forth in SEQ ID NO: 1 (GENBANK Accession No: NM_020822.2). In certain embodiments, the KCNT1 nucleic acid has the sequence set forth in SEQ ID NO: 2 (GENBANK Accession No: NC_000009.12 truncated from nucleotides 135698001 to 135796000). In certain embodiments, the KCNT1 nucleic acid has the sequence set forth in SEQ ID NO: 3 (GENBANK Accession No.: NM_020822.3), which is a splicing variant of SEQ ID NO: 1.

[0269] In certain embodiments an oligomeric compound complementary to SEQ ID NO: 1, SEQ ID NO: 2, or SEQ ID NO: 3 is capable of reducing a KCNT1 RNA in a cell. In certain embodiments an oligomeric compound complementary to SEQ ID NO: 1, SEQ ID NO: 2, or SEQ ID NO: 3 is capable of reducingKCNT1 protein in a cell. In certain embodiments, the cell is in vitro. In certain embodiments, the cell is in a subject. In certain embodiments, the oligomeric compound consists of a modified oligonucleotide. In certain embodiments, an oligomeric compound complementary to SEQ ID NO: 1, SEQ ID NO: 2, or SEQ ID NO:3 is capable of ameliorating one or more symptom or hallmark of a neurological condition when it is introduced to a cell in a subject. In certain embodiments, the neurological condition is epilepsy. In certain embodiments, the one or more symptoms or hallmarks are selected from seizure, brain damage, demyelination, hypotonia, microcephaly, depression, anxiety, and cognitive dysfunction, and combinations thereof.

[0270] In certain embodiments, an oligomeric compound complementary to SEQ ID NO: 1, SEQ ID NO: 2, or SEQ ID NO: 3 is capable of reducing a detectable amount of KCNT1 RNA in the CSF of a subject when the oligomeric compound is administered to the CSF of the subject. The detectable amount of KCNT1 RNA may be reduced by at least 10%, at least 20%, at least 30%, at least 40%, at least 50%, at least 60%, at least 70%, at least 80%, or at least 90%. In certain embodiments, an oligomeric compound complementary to SEQ ID NO: 1, SEQ ID NO: 2, or SEQ ID NO: 3 is capable of reducing a detectable amount of KCNT1 protein in the CSF of the subject when the oligomeric compound is administered to the CSF of the subject. The detectable amount of KCNT1 protein may be reduced by at least 10%, at least 20%, at least 30%, at least 40%, at least 50%, at least 60%, at least 70%, at least 80%, or at least 90%.

[0271] C. Certain Target Nucleic Acids in Certain Tissues

[0272] In certain embodiments, oligomeric compounds comprise or consist of an oligonucleotide comprising a region that is complementary to a target nucleic acid, wherein the target nucleic acid is expressed in a pharmacologically relevant tissue. In certain embodiments, the pharmacologically relevant tissues are the cells and tissues that comprise the central nervous system (CNS). Such tissues include brain tissues, such as, cortex, substantia nigra, striatum, midbrain, and brainstem and spinal cord.

### VI. Certain Pharmaceutical Compositions

[0273] In certain embodiments, described herein are pharmaceutical compositions comprising one or more oligomeric compounds. In certain embodiments, the one or more oligomeric compounds each consists of a modified oligonucleotide. In certain embodiments, the pharmaceutical composition comprises a pharmaceutically acceptable diluent or carrier. In certain embodiments, a pharmaceutical composition comprises or consists of a sterile saline solution and one or more oligomeric compound. In certain embodiments, the sterile saline is pharmaceutical grade saline. In certain embodiments, a pharmaceutical composition comprises or consists of one or more oligomeric compound and sterile water. In certain embodiments, the sterile water is pharmaceutical grade water. In certain embodiments, a pharmaceutical composition comprises or consists of one or more oligomeric compound and phosphate-buffered saline (PBS). In certain embodiments, the sterile PBS is pharmaceutical grade PBS. In certain embodiments, a pharmaceutical composition comprises or consists of one or more oligomeric compound and artificial cerebrospinal fluid. In certain embodiments, the artificial cerebrospinal fluid is pharmaceutical grade.

[0274] In certain embodiments, a pharmaceutical composition comprises a modified oligonucleotide and artificial cerebrospinal fluid. In certain embodiments, a pharmaceutical composition consists of a modified oligonucleotide and artificial cerebrospinal fluid. In certain embodiments, a pharmaceutical composition consists essentially of a modified oligonucleotide and artificial cerebrospinal fluid. In certain embodiments, the artificial cerebrospinal fluid is pharmaceutical grade.

[0275] In certain embodiments, pharmaceutical compositions comprise one or more oligomeric compound and one or more excipients. In certain embodiments, excipients are selected from water, salt solutions, alcohol, polyethylene glycols, gelatin, lactose, amylase, magnesium stearate, talc, silicic acid, viscous paraffin, hydroxymethylcellulose and polyvinylpyrrolidone.

[0276] In certain embodiments, oligomeric compounds may be admixed with pharmaceutically acceptable active and/or inert substances for the preparation of pharmaceutical compositions or formulations. Compositions and methods for the formulation of pharmaceutical compositions depend on a number of criteria, including, but not limited to, route of administration, extent of disease, or dose to be administered.

[0277] In certain embodiments, pharmaceutical compositions comprising an oligomeric compound encompass any pharmaceutically acceptable salts of the oligomeric compound, esters of the oligomeric compound, or salts of such esters. In certain embodiments, pharmaceutical compositions comprising oligomeric compounds comprising one or more oligonucleotide, upon administration to a subject, including a human, are capable of providing (directly or indirectly) the biologically active metabolite or residue thereof. Accordingly, for example, the disclosure is also drawn to pharmaceutically acceptable salts of oligomeric compounds, prodrugs, pharmaceutically acceptable salts of such prodrugs, and other bioequivalents. Suitable pharmaceutically acceptable salts include, but are not limited to, sodium and potassium salts. In certain embodiments, prodrugs comprise one or more conjugate group attached to an oligonucleotide, wherein the conjugate group is cleaved by endogenous nucleases within the body.

[0278] Lipid moieties have been used in nucleic acid therapies in a variety of methods. In certain such methods, the nucleic acid, such as an oligomeric compound, is introduced into preformed liposomes or lipoplexes made of mixtures of cationic lipids and neutral lipids. In certain methods, DNA complexes with mono- or poly-cationic lipids are formed without the presence of a neutral lipid. In certain embodiments, a lipid moiety is selected to increase distribution of a pharmaceutical agent to a particular cell or tissue. In certain embodiments, a lipid moiety is selected to increase distribution of a pharmaceutical agent to fat tissue. In certain embodiments, a lipid moiety is selected to increase distribution of a pharmaceutical agent to muscle tissue.

[0279] In certain embodiments, pharmaceutical compositions comprise a delivery system. Examples of delivery systems include, but are not limited to, liposomes and emulsions. Certain delivery systems are useful for preparing certain pharmaceutical compositions including those comprising hydrophobic compounds. In certain embodiments, certain organic solvents such as dimethylsulfoxide are used.

[0280] In certain embodiments, pharmaceutical compositions comprise one or more tissue-specific delivery molecules designed to deliver the one or more pharmaceutical agents of the present invention to specific tissues or cell types. For example, in certain embodiments, pharmaceutical compositions include liposomes coated with a tissue-specific antibody.

[0281] In certain embodiments, pharmaceutical compositions comprise a co-solvent system. Certain of such co-solvent systems comprise, for example, benzyl alcohol, a nonpolar surfactant, a water-miscible organic polymer, and an aqueous phase. In certain embodiments, such co-solvent systems are used for hydrophobic compounds. A non-limiting example of such a co-solvent system is the VPD co-solvent system, which is a solution of absolute ethanol comprising 3% w/v benzyl alcohol, 8% w/v of the nonpolar surfactant Polysorbate 80™ and 65% w/v polyethylene glycol 300. The proportions of such co-solvent systems may be varied considerably without significantly altering their solubility and toxicity characteristics. Furthermore, the identity of co-solvent components may be varied: for example, other surfactants may be used instead of Polysorbate 80™; the fraction size of polyethylene glycol may be varied; other biocompatible polymers may replace polyethylene glycol, e.g., polyvinyl pyrrolidone; and other sugars or polysaccharides may substitute for dextrose.

[0282] In certain embodiments, pharmaceutical compositions are prepared for oral administration. In certain embodiments, pharmaceutical compositions are prepared for buccal administration. In certain embodiments, a pharmaceutical composition is prepared for administration by injection (e.g., intravenous, subcutaneous, intramuscular, intrathecal (IT), intracerebroventricular (ICV), etc.). In certain of such embodiments, a pharmaceutical composition comprises a carrier and is formulated in aqueous solution, such as water or physiologically compatible buffers such as Hanks's solution, Ringer's solution, or physiological saline buffer.

[0283] In certain embodiments, other ingredients are included (e.g., ingredients that aid in solubility or serve as preservatives). In certain embodiments, injectable suspensions are prepared using appropriate liquid carriers, suspending agents and the like. Certain pharmaceutical compositions for injection are presented in unit dosage form, e.g., in ampoules or in multi-dose containers. Certain pharmaceutical compositions for injection are suspensions, solutions or emulsions in oily or aqueous vehicles, and may contain formulatory agents such as suspending, stabilizing and/or dispersing agents. Certain solvents suitable for use in pharmaceutical compositions for injection include, but are not limited to, lipophilic solvents and fatty oils, such as sesame oil, synthetic fatty acid esters, such as ethyl oleate or triglycerides, and liposomes.

[0284] Under certain conditions, certain compounds disclosed herein act as acids. Although such compounds may be drawn or described in protonated (free acid) form, or ionized and in association with a cation (salt) form, aqueous solutions of such compounds exist in equilibrium among such forms. For example, a phosphate linkage of an oligonucleotide in aqueous solution exists in equilibrium among free acid, anion and salt forms. Unless otherwise indicated, compounds described herein are intended to include all such forms. Moreover, certain oligonucleotides have several such linkages, each of which is in equilibrium. Thus, oligonucleotides in solution exist in an ensemble of forms at multiple positions all at equilibrium. The term “oligonucleotide” is intended to include all such forms. Drawn structures necessarily depict a single form. Nevertheless, unless otherwise indicated, such drawings are likewise intended to include corresponding forms. Herein, a structure depicting the free acid of a compound followed by the term “or a salt thereof” expressly includes all such forms that may be fully or partially protonated/de-protonated/in association with a cation. In certain instances, one or more specific cation is identified.

[0285] In certain embodiments, modified oligonucleotides or oligomeric compounds are in aqueous solution with sodium. In certain embodiments, modified oligonucleotides or oligomeric compounds are in aqueous solution with potassium. In certain embodiments, modified oligonucleotides or oligomeric compounds are in PBS. In certain embodiments, modified oligonucleotides or oligomeric compounds are in water. In certain such embodiments, the pH of the solution is adjusted with NaOH and/or HCl to achieve a desired pH.

[0286] Herein, certain specific doses are described. A dose may be in the form of a dosage unit. For clarity, a dose (or dosage unit) of a modified oligonucleotide or an oligomeric compound in milligrams indicates the mass of the free acid form of the modified oligonucleotide or oligomeric compound. As described above, in aqueous solution, the free acid is in equilibrium with anionic and salt forms. However, for the purpose of calculating dose, it is assumed that the modified oligonucleotide or oligomeric compound exists as a solvent-free, sodium-acetate free, anhydrous, free acid. For example, where a modified oligonucleotide or an oligomeric compound is in solution comprising sodium (e.g., saline), the modified oligonucleotide or oligomeric compound may be partially or fully de-protonated and in association with Na+ ions. However, the mass of the protons is nevertheless counted toward the weight of the dose, and the mass of the Na+ ions are not counted toward the weight of the dose. Thus, for example, a dose, or dosage unit, of 80 mg of Compound No. 1080855 equals the number of fully protonated molecules that weighs 80 mg. This would be equivalent to 85 mg of solvent-free, sodium-acetate free, anhydrous sodiated Compound No. 1080855. When an oligomeric compound comprises a conjugate group, the mass of the conjugate group is included in calculating the dose of such oligomeric compound. If the conjugate group also has an acid, the conjugate group is likewise assumed to be fully protonated for the purpose of calculating dose.

### Nonlimiting Disclosure and Incorporation by Reference

[0287] Each of the literature and patent publications listed herein is incorporated by reference in its entirety.

[0288] While certain compounds, compositions and methods described herein have been described with specificity in accordance with certain embodiments, the following examples serve only to illustrate the compounds described herein and are not intended to limit the same. Each of the references, GenBank accession numbers, and the like recited in the present application is incorporated herein by reference in its entirety.

[0289] Although the sequence listing accompanying this filing identifies each sequence as either “RNA” or “DNA” as required, in reality, those sequences may be modified with any combination of chemical modifications. One of skill in the art will readily appreciate that such designation as “RNA” or “DNA” to describe modified oligonucleotides is, in certain instances, arbitrary. For example, an oligonucleotide comprising a nucleoside comprising a 2′-OH sugar moiety and a thymine base could be described as a DNA having a modified sugar (2′-OH in place of one 2′-H of DNA) or as an RNA having a modified base (thymine (methylated uracil) in place of a uracil of RNA). Accordingly, nucleic acid sequences provided herein, including, but not limited to those in the sequence listing, are intended to encompass nucleic acids containing any combination of natural or modified RNA and/or DNA, including, but not limited to such nucleic acids having modified nucleobases. By way of further example and without limitation, an oligomeric compound having the nucleobase sequence “ATCGATCG” encompasses any oligomeric compounds having such nucleobase sequence, whether modified or unmodified, including, but not limited to, such compounds comprising RNA bases, such as those having sequence “AUCGAUCG” and those having some DNA bases and some RNA bases such as “AUCGATCG” and oligomeric compounds having other modified nucleobases, such as “AT^{m}CGAUCG,” wherein ^{m}C indicates a cytosine base comprising a methyl group at the 5-position.

[0290] Certain compounds described herein (e.g., modified oligonucleotides) have one or more asymmetric center and thus give rise to enantiomers, diastereomers, and other stereoisomeric configurations that may be defined, in terms of absolute stereochemistry, as (R) or (S), as α or β such as for sugar anomers, or as (D) or (L), such as for amino acids, etc. Compounds provided herein that are drawn or described as having certain stereoisomeric configurations include only the indicated compounds. Compounds provided herein that are drawn or described with undefined stereochemistry include all such possible isomers, including their stereorandom and optically pure forms, unless specified otherwise. Likewise, tautomeric forms of the compounds herein are also included unless otherwise indicated. Unless otherwise indicated, compounds described herein are intended to include corresponding salt forms.

[0291] The compounds described herein include variations in which one or more atoms are replaced with a non-radioactive isotope or radioactive isotope of the indicated element. For example, compounds herein that comprise hydrogen atoms encompass all possible deuterium substitutions for each of the ¹H hydrogen atoms. Isotopic substitutions encompassed by the compounds herein include but are not limited to: ²H or ³H in place of ¹H, ¹³C or ¹⁴C in place of ¹²C, ¹⁵N in place of ¹⁴N, ¹⁷O or ¹⁸O in place of ¹⁶O, and ³³S, ³⁴S, ³⁵S, or ³⁶S in place of ³²S. In certain embodiments, non-radioactive isotopic substitutions may impart new properties on the oligomeric compound that are beneficial for use as a therapeutic or research tool. In certain embodiments, radioactive isotopic substitutions may make the compound suitable for research or diagnostic purposes such as imaging.

### EXAMPLES

[0292] The following examples illustrate certain embodiments of the present disclosure and are not limiting. Moreover, where specific embodiments are provided, the inventors have contemplated generic application of those specific embodiments. For example, disclosure of an oligonucleotide having a particular motif provides reasonable support for additional oligonucleotides having the same or similar motif And, for example, where a particular high-affinity modification appears at a particular position, other high-affinity modifications at the same position are considered suitable, unless otherwise indicated.

### Example 1: Effect of 5-10-5 MOE Gapmer Modified Oligonucleotides on Human KCNT1 RNA In Vitro, Single Dose

[0293] Modified oligonucleotides complementary to human KCNT1 nucleic acid were tested for their effect on KCNT1 RNA levels in vitro.

[0294] The modified oligonucleotides in the tables below are 5-10-5 MOE gapmers with mixed internucleoside linkages. The gapmers are 20 nucleosides in length, wherein the central gap segment consists of ten 2′-β-D-deoxynucleosides and the 3′ and 5′ wings each consist of five 2′-MOE nucleosides. The motif for the gapmers is (from 5′ to 3′): eeeeeddddddddddeeeee; wherein ‘d’ represents a 2′-β-D-deoxyribosyl sugar moiety, and ‘e’ represents a 2′-MOE sugar moiety. The internucleoside linkage motif for the gapmers is (from 5′ to 3′): soooossssssssssooss; wherein ‘s’ represents a phosphorothioate internucleoside linkage, and ‘o’ represents a phosphodiester internucleoside linkage. All cytosine residues are 5-methylcytosines.

[0295] “Start site” indicates the 5′-most nucleoside to which the modified oligonucleotide is complementary in the human gene sequence. “Stop site” indicates the 3′-most nucleoside to which the modified oligonucleotide is complementary in the human gene sequence. Each modified oligonucleotide listed in the Tables below is 100% complementary to SEQ ID NO: 1 (GENBANK Accession No. NM_020822.2) or SEQ ID NO: 2 (GENBANK Accession No. NC_000009.12 truncated from nucleotides 135698001 to 135796000). ‘N/A’ indicates that the modified oligonucleotide is not 100% complementary to that particular gene sequence.

[0296] Cultured SH-SY5Y cells (a neuroblastoma cell line) at a density of 20,000 cells per well were treated with 4,000 nM modified oligonucleotide by electroporation. After a treatment period of approximately 24 hours, total RNA was isolated from the cells and KCNT1 RNA levels were measured by quantitative real-time RTPCR. Human KCNT1 primer probe set RTS39508 (forward sequence GTCAACGTGCAGACCATGT, designated herein as SEQ ID NO: 11; reverse sequence TCGCTCCCTCTTTTCTAGTTTG, designated herein as SEQ ID NO: 12; probe sequence AGCTCACCCACCCTTCCAACATG, designated herein as SEQ ID NO: 13) was used to measure RNA levels presented in Tables 1-6 and human KCNT1 primer probe set RTS39496 (forward sequence CAGGTGGAGTTCTACGTCAA, designated herein as SEQ ID NO: 14; reverse sequence GAGAAGTTGAACAGCCGGAT, designated herein as SEQ ID NO 15, probe sequence TGATGAAGAACAGCTTGAGCCGCT, designated herein as SEQ ID NO: 16) was used to measure RNA levels presented in Tables 7-38. KCNT1 RNA levels were normalized to total RNA content, as measured by RIBOGREEN®. Reduction of KCNT1 RNA is presented in Tables 1-6 below as percent KCNT1 RNA levels relative to untreated control (UTC) cells. Each table represents results from an individual assay plate. ‘ND’ indicates that the 00 UTC is not defined for that particular modified oligonucleotide in that particular experiment due to experimental error. However, activities of selected modified oligonucleotides, including those that are not defined in Example 1, are successfully demonstrated in Example 2.

TABLE 1
Reduction of KCNT1 RNA by 4,000 nM 5-10-5 MOE gapmers with a mixed backbone measured
with human KCNT1 primer probe set RTS39508

| | SEQ | SEQ | SEQ | SEQ | | | |
|---|---|---|---|---|---|---|---|
| | ID | ID | ID | ID | | | |
| | NO: 1 | NO: 1 | NO: 2 | NO: 2 | | | SEQ |
| Compound | Start | Stop | Start | Stop | | KCNT1 | ID |
| Number | Site | Site | Site | Site | Sequence (5′ to 3′) | (% UTC) | NO |
| 1080685 | 17 | 36 | 4201 | 4220 | AGTGGGAGCCGCCACCTTCT | 107 | 21 |
| 1080691 | 50 | 69 | 4234 | 4253 | CTGGCAGCTCGGACCCGACC | 114 | 22 |
| 1080697 | 123 | 142 | 4307 | 4326 | GTGTAGCCCCCGCCGCGCGC | 83 | 23 |
| 1080703 | 194 | 213 | 16586 | 16605 | GGAGCGCGCCGTCCCCCGCG | 43 | 24 |
| 1080709 | 226 | 245 | 16618 | 16637 | CAGGTCGCTCATCTTGAAGC | 40 | 25 |
| 1080715 | 329 | 348 | 52098 | 52117 | CGTAGAACTCCACCTGGACC | 25 | 26 |
| 1080721 | 458 | 477 | 52991 | 53010 | GGACGCGCACAATGTAGAGC | 28 | 27 |
| 1080727 | 590 | 609 | 57145 | 57164 | TCGCCCACAGTGTCATCTTT | 33 | 28 |
| 1080733 | 613 | 632 | 58871 | 58890 | TATTATGGCCACGATGACCT | 64 | 29 |
| 1080739 | 709 | 728 | 59190 | 59209 | GTTGATCATCTCCAGGACGA | 57 | 30 |
| 1080745 | 953 | 972 | 61703 | 61722 | ACAGGTTCTCGCCCGCCCGC | 78 | 31 |
| 1080751 | 1069 | 1088 | 61819 | 61838 | GGCCACGCAGATCATGATGA | 54 | 32 |
| 1080757 | 1125 | 1144 | 67046 | 67065 | TGCCGCTCCATCCAGAGGTA | 37 | 33 |
| 1080763 | 1229 | 1248 | 67150 | 67169 | CGTTCAGGAAGTCCATGAGA | 36 | 34 |
| 1080768 | 1498 | 1517 | 70851 | 70870 | GAAGTCCTTCACGGCCCAGG | 34 | 35 |
| 1080774 | 1852 | 1871 | 72865 | 72884 | CTTCAGCCCGATGAGGCACA | 54 | 36 |
| 1080780 | 1956 | 1975 | 72969 | 72988 | GCCGAGTTCTCCTCCTTGGT | 34 | 37 |
| 1080786 | 2197 | 2216 | 74829 | 74848 | CAGGACGGGCGCGATGCTGG | 57 | 38 |
| 1080792 | 2262 | 2281 | 74894 | 74913 | ACCTCATCCTCCGACTGGTC | 58 | 39 |
| 1080798 | 2460 | 2479 | 79374 | 79393 | AGCTTGTTCTTGAACCCGTA | 61 | 40 |
| 1080804 | 2478 | 2497 | 79392 | 79411 | TCTGCCGAGACGATGATCAG | 39 | 41 |
| 1080810 | 2503 | 2522 | 79417 | 79436 | GTTGTACAGCCCATTGCCGG | 66 | 42 |
| 1080816 | 2530 | 2549 | 79444 | 79463 | GTAGTAGGCCCGCAGTGGCA | 42 | 43 |
| 1080822 | 2971 | 2990 | 86079 | 86098 | GATGCTGAAGACGCGGCCGG | 50 | 44 |
| 1080828 | 3078 | 3097 | 86595 | 86614 | CAGAGGTACCCCGAGCCCGG | 50 | 45 |
| 1080834 | 3387 | 3406 | 88332 | 88351 | TGCAGGCTCTTGCGCCGTAG | 53 | 46 |
| 1080840 | 3462 | 3481 | 88407 | 88426 | TGCTGGCTGATCCACTCCGC | 44 | 47 |
| 1080846 | 3525 | 3544 | 88470 | 88489 | ATGCGGTTCTTCACCAGCTC | 14 | 48 |
| 1080852 | 3842 | 3861 | 94221 | 94240 | CCACCGTGTCCTCACACGCT | 23 | 49 |
| 1080858 | 3875 | 3894 | 94254 | 94273 | GTAGAGTGTGCCATCCCCAG | 23 | 50 |
| 1080864 | 4046 | 4065 | 94425 | 94444 | AGCCCTGGTCACGAGTTGCG | 61 | 51 |
| 1080870 | 4478 | 4497 | 94857 | 94876 | TGCCCCCTAGATGCAGTGGC | 44 | 52 |
| 1080876 | 4493 | 4512 | 94872 | 94891 | CCATCTTCCGCCCAATGCCC | 35 | 53 |
| 1080882 | 4502 | 4521 | 94881 | 94900 | GGAAATGCACCATCTTCCGC | 27 | 54 |
| 1080888 | 4698 | 4717 | 95077 | 95096 | CCGTACAAACCAGTAAGGAA | 23 | 55 |
| 1080894 | 4705 | 4724 | 95084 | 95103 | GCGCTGACCGTACAAACCAG | 16 | 56 |
| 1080900 | N/A | N/A | 90128 | 90147 | GGTTTACCCGATTCATGACA | 26 | 57 |
| 1080906 | N/A | N/A | 3591 | 3610 | ACACAGCACCTTTAGACGGG | 153 | 58 |
| 1080912 | N/A | N/A | 6781 | 6800 | ACTGCTCCCTAATATGGGCC | 88 | 59 |
| 1080918 | N/A | N/A | 8833 | 8852 | AAATGACCAACTCACTGGCG | 77 | 60 |
| | | | 37277 | 37296 | | | |
| 1080924 | N/A | N/A | 14472 | 14491 | CCTGGCATAGCCAGACACGG | 92 | 61 |
| 1080930 | N/A | N/A | 17507 | 17526 | TGCCGTACCCTACACGCTGG | 30 | 62 |
| 1080936 | N/A | N/A | 18221 | 18240 | ACTTCCTGCCCAATATCGGA | 58 | 63 |
| 1080942 | N/A | N/A | 20077 | 20096 | GGAGGGTCCTCCAAGCGGCT | 38 | 64 |
| 1080948 | N/A | N/A | 23023 | 23042 | TTCACGGCCCCTAAACCACC | 74 | 65 |
| 1080954 | N/A | N/A | 24946 | 24965 | GGAGGATTTCCCACGACATC | 47 | 66 |
| 1080960 | N/A | N/A | 27095 | 27114 | GGCCATTGAGCCACCAAGGG | 30 | 67 |
| 1080966 | N/A | N/A | 29977 | 29996 | CATTTTAACCCTCTTTGCCG | 90 | 68 |
| 1080972 | N/A | N/A | 30914 | 30933 | TCAATCCCGAACACCATGTC | 61 | 69 |
| 1080978 | N/A | N/A | 32653 | 32672 | GGTCCGAAATCCCAAGCCTG | 23 | 70 |
| 1080984 | N/A | N/A | 34972 | 34991 | GTGCCGGAATCCTCACCCTT | 51 | 71 |
| 1080990 | N/A | N/A | 38017 | 38036 | ACCGGGCACAGATCCCACCT | 53 | 72 |
| 1080996 | N/A | N/A | 40434 | 40453 | TCCGTGAGATCCACACTCCA | 24 | 73 |
| 1081002 | N/A | N/A | 45589 | 45608 | GGCTTCTATCTCACACCCGT | 34 | 74 |
| 1081008 | N/A | N/A | 47517 | 47536 | CCGTCTGCTCAAACCATCAG | 60 | 75 |
| 1081014 | N/A | N/A | 49388 | 49407 | GGCGGTACCCAGGGACCACC | 58 | 76 |
| 1081020 | N/A | N/A | 52241 | 52260 | CCAGCCTTCGCCATCGCCAG | 33 | 77 |
| 1081026 | N/A | N/A | 56009 | 56028 | GCGCCTGGCTATTGGGAGCT | 25 | 78 |
| | | | 56073 | 56092 | | | |
| 1081032 | N/A | N/A | 60111 | 60130 | ACCTGTGTCTCGGCTGAGGC | 26 | 79 |
| | | | 60153 | 60172 | | | |
| | | | 60245 | 60264 | | | |
| 1081038 | N/A | N/A | 60194 | 60213 | CGTCTCGGCTGAGGCCCACG | 36 | 80 |
| | | | 60286 | 60305 | | | |
| 1081044 | N/A | N/A | 64878 | 64897 | CACCATGGCCATACCCATCG | 61 | 81 |
| 1081050 | N/A | N/A | 66061 | 66080 | GCATTGCACTTATCCAGCGC | 27 | 82 |
| 1081056 | N/A | N/A | 67948 | 67967 | GTCCACCCCAGACGATCCAC | 29 | 83 |
| | | | 68544 | 68563 | | | |
| 1081062 | N/A | N/A | 67979 | 67998 | ATGGTCCATCCCAGAAGGTC | 34 | 84 |
| | | | 68118 | 68137 | | | |
| 1081068 | N/A | N/A | 68507 | 68526 | AGAGGGTCCACCATGGATGG | 50 | 85 |
| | | | 68563 | 68582 | | | |
| 1081074 | N/A | N/A | 68517 | 68536 | GGTCCACCCAAGAGGGTCCA | 34 | 86 |
| | | | 68573 | 68592 | | | |
| 1081080 | N/A | N/A | 69967 | 69986 | TGTGCAGGCTGACAGCGGGT | 13 | 87 |
| | | | 70025 | 70044 | | | |
| 1081086 | N/A | N/A | 71040 | 71059 | TCCTGCCCCAGACGCACCGT | 33 | 88 |
| | | | 71080 | 71099 | | | |
| 1081092 | N/A | N/A | 71173 | 71192 | GTGTGCACACGCGCCCTGCC | 18 | 89 |
| | | | 71293 | 71312 | | | |
| 1081098 | N/A | N/A | 72815 | 72834 | TCAGGTACCGCCGCTCACCC | 89 | 90 |
| 1081104 | N/A | N/A | 75842 | 75861 | GGGCTCTTACCCACATACTT | 25 | 91 |
| 1081110 | N/A | N/A | 77408 | 77427 | CGCCAGCCTTACCTTGTCCA | 156 | 92 |
| 1081116 | N/A | N/A | 79137 | 79156 | AGCTGTACCCACAGGCGGCA | 69 | 93 |
| 1081122 | N/A | N/A | 82606 | 82625 | CCGAGCATCCCCCTACGCCT | 53 | 94 |
| 1081128 | N/A | N/A | 84928 | 84947 | GTTCGCCCTTACTCATCAGT | 63 | 95 |
| 1081134 | N/A | N/A | 86431 | 86450 | CACAGGTCCATACCCCACCG | 51 | 96 |
| 1081140 | N/A | N/A | 91100 | 91119 | TCCGAGCACCACAGTGCCCG | 76 | 97 |
| 1081146 | N/A | N/A | 92063 | 92082 | TGCCCGGACCACACGCTTCT | 48 | 98 |

TABLE 2
Reduction of KCNT1 RNA by 4,000 nM 5-10-5 MOE gapmers with a mixed backbone measured
with human KCNT1 primer probe set RTS39508

| | SEQ | SEQ | SEQ | SEQ | | | |
|---|---|---|---|---|---|---|---|
| | ID | ID | ID | ID | | | |
| | NO: 1 | NO: 1 | NO: 2 | NO: 2 | | | SEQ |
| Compound | Start | Stop | Start | Stop | | KCNT1 | ID |
| Number | Site | Site | Site | Site | Sequence (5′ to 3′) | (% UTC) | NO |
| 1080686 | 19 | 38 | 4203 | 4222 | CGAGTGGGAGCCGCCACCTT | 113 | 99 |
| 1080692 | 77 | 96 | 4261 | 4280 | GCGCCCCGTCAGGGAGTGGC | 84 | 100 |
| 1080698 | 125 | 144 | 4309 | 4328 | TGGTGTAGCCCCCGCCGCGC | 59 | 101 |
| 1080704 | 199 | 218 | 16591 | 16610 | GTCCAGGAGCGCGCCGTCCC | 30 | 102 |
| 1080710 | 234 | 253 | 16626 | 16645 | TCGGAGTCCAGGTCGCTCAT | 31 | 103 |
| 1080716 | 357 | 376 | 52126 | 52145 | AGCCGCTCCTTGAAGGTGTT | 36 | 104 |
| 1080722 | 464 | 483 | 52997 | 53016 | CGAGCAGGACGCGCACAATG | 21 | 105 |
| 1080728 | 591 | 610 | 57146 | 57165 | ATCGCCCACAGTGTCATCTT | 32 | 106 |
| 1080734 | 686 | 705 | 59167 | 59186 | ACACGCGGAAGATCTGCTCC | 41 | 107 |
| 1080740 | 760 | 779 | 59308 | 59327 | GAACAGGTTCCGCAGCGGCG | 20 | 108 |
| 1080746 | 955 | 974 | 61705 | 61724 | GGACAGGTTCTCGCCCGCCC | 53 | 109 |
| 1080752 | 1075 | 1094 | 61825 | 61844 | CACGAGGGCCACGCAGATCA | 83 | 110 |
| 1080758 | 1147 | 1166 | 67068 | 67087 | GCTGTAGTTGCCCCCTGACT | 48 | 111 |
| 1080764 | 1299 | 1318 | 67648 | 67667 | TGGACATCCATCTCCGTGGG | 28 | 112 |
| 1080769 | 1502 | 1521 | 70855 | 70874 | GGGCGAAGTCCTTCACGGCC | 26 | 113 |
| 1080775 | 1854 | 1873 | 72867 | 72886 | CGCTTCAGCCCGATGAGGCA | 52 | 114 |
| 1080781 | 1957 | 1976 | 72970 | 72989 | GGCCGAGTTCTCCTCCTTGG | 28 | 115 |
| 1080787 | 2207 | 2226 | 74839 | 74858 | CGGCCAGTTCCAGGACGGGC | 55 | 116 |
| 1080793 | 2266 | 2285 | 74898 | 74917 | CGTCACCTCATCCTCCGACT | 43 | 117 |
| 1080799 | 2473 | 2492 | 79387 | 79406 | CGAGACGATGATCAGCTTGT | 39 | 118 |
| 1080805 | 2479 | 2498 | 79393 | 79412 | CTCTGCCGAGACGATGATCA | 40 | 119 |
| 1080811 | 2504 | 2523 | 79418 | 79437 | AGTTGTACAGCCCATTGCCG | 42 | 120 |
| 1080817 | 2542 | 2561 | 79456 | 79475 | CTTGCGGGATCTGTAGTAGG | 60 | 121 |
| 1080823 | 3016 | 3035 | 86533 | 86552 | GTAGTCCTTCACGAAGGACT | 72 | 122 |
| 1080829 | 3079 | 3098 | 86596 | 86615 | ACAGAGGTACCCCGAGCCCG | 43 | 123 |
| 1080835 | 3411 | 3430 | 88356 | 88375 | TTGCGGCTCAGCCTCCGGGC | 32 | 124 |
| 1080841 | 3463 | 3482 | 88408 | 88427 | CTGCTGGCTGATCCACTCCG | 42 | 125 |
| 1080847 | 3526 | 3545 | 88471 | 88490 | CATGCGGTTCTTCACCAGCT | 18 | 126 |
| 1080853 | 3847 | 3866 | 94226 | 94245 | TAGTGCCACCGTGTCCTCAC | 26 | 127 |
| 1080859 | 3877 | 3896 | 94256 | 94275 | GAGTAGAGTGTGCCATCCCC | 15 | 128 |
| 1080865 | 4369 | 4388 | 94748 | 94767 | GACGCACCCCTCTCACATGC | 21 | 129 |
| 1080871 | 4480 | 4499 | 94859 | 94878 | AATGCCCCCTAGATGCAGTG | 28 | 130 |
| 1080877 | 4495 | 4514 | 94874 | 94893 | CACCATCTTCCGCCCAATGC | 24 | 131 |
| 1080883 | 4583 | 4602 | 94962 | 94981 | CCGGAGGCTGAATTGTGCTT | 27 | 132 |
| 1080889 | 4699 | 4718 | 95078 | 95097 | ACCGTACAAACCAGTAAGGA | 15 | 133 |
| 1080895 | N/A | N/A | 90121 | 90140 | CCGATTCATGACATCACTGG | 20 | 134 |
| 1080901 | N/A | N/A | 90129 | 90148 | AGGTTTACCCGATTCATGAC | 28 | 135 |
| 1080907 | N/A | N/A | 4599 | 4618 | CCCAGCTTCTTACCAGGTCG | 121 | 136 |
| 1080913 | N/A | N/A | 7382 | 7401 | GGGTACACGATACCCGTTCA | 56 | 137 |
| 1080919 | N/A | N/A | 9148 | 9167 | GCACCGGGCCTTATCTGATC | 135 | 138 |
| 1080925 | N/A | N/A | 14834 | 14853 | GCACACGGCCATAAGCAGGT | 86 | 139 |
| 1080931 | N/A | N/A | 17508 | 17527 | CTGCCGTACCCTACACGCTG | 37 | 140 |
| 1080937 | N/A | N/A | 18644 | 18663 | GCACAGCACGCCAAGACCGC | 29 | 141 |
| 1080943 | N/A | N/A | 20549 | 20568 | CGGCACTTCCACCTTACCCA | 27 | 142 |
| 1080949 | N/A | N/A | 23033 | 23052 | TCCTCGAACCTTCACGGCCC | 42 | 143 |
| 1080955 | N/A | N/A | 25141 | 25160 | TCGGAGAGCCACGCCCGTCA | 43 | 144 |
| 1080961 | N/A | N/A | 27253 | 27272 | ACAGGAATCTTTCGAAGGCC | 43 | 145 |
| 1080967 | N/A | N/A | 30331 | 30350 | CCCTCCAAACAATTATGCGA | 67 | 146 |
| 1080973 | N/A | N/A | 30919 | 30938 | ACAGTTCAATCCCGAACACC | 47 | 147 |
| 1080979 | N/A | N/A | 33660 | 33679 | CTAGGACTATTATACCCAGC | 31 | 148 |
| 1080985 | N/A | N/A | 36054 | 36073 | TCGCTTTGCCTACCGCGAGC | 88 | 149 |
| 1080991 | N/A | N/A | 38455 | 38474 | CCGGCTCAAACCACCGCCAG | 46 | 150 |
| 1080997 | N/A | N/A | 42272 | 42291 | CGGCAGGTTCCCACACGCAA | 30 | 151 |
| 1081003 | N/A | N/A | 45594 | 45613 | GGCACGGCTTCTATCTCACA | 41 | 152 |
| 1081009 | N/A | N/A | 48647 | 48666 | CCCTTTACCTCCCCGTGGAC | 59 | 153 |
| 1081015 | N/A | N/A | 49818 | 49837 | GCTTGTCACCCCACCGGGCA | 50 | 154 |
| 1081021 | N/A | N/A | 52720 | 52739 | GCCCCACCTTACAGGTGCCT | 39 | 155 |
| 1081027 | N/A | N/A | 56052 | 56071 | GAGTGGAGACTCATCCCACC | 33 | 156 |
| | N/A | N/A | 56116 | 56135 | | | |
| 1081033 | N/A | N/A | 60112 | 60131 | CACCTGTGTCTCGGCTGAGG | 44 | 157 |
| | | | 60154 | 60173 | | | |
| | | | 60246 | 60265 | | | |
| 1081039 | N/A | N/A | 60978 | 60997 | AGTGGTGACCAGGCCTCGCT | 27 | 158 |
| 1081045 | N/A | N/A | 65270 | 65289 | GCCCACCCTTACCATCGCCA | 35 | 159 |
| 1081051 | N/A | N/A | 66638 | 66657 | GTCAGGAGCCTATGTCTGGG | 29 | 160 |
| 1081057 | N/A | N/A | 67950 | 67969 | TGGTCCACCCCAGACGATCC | 23 | 161 |
| | | | 68546 | 68565 | | | |
| 61081063 | N/A | N/A | 68042 | 68061 | CACCCTGGATGGTCCACCCT | 37 | 162 |
| | | | 68363 | 68382 | | | |
| 1081069 | N/A | N/A | 68508 | 68527 | AAGAGGGTCCACCATGGATG | 43 | 163 |
| | | | 68564 | 68583 | | | |
| 1081075 | N/A | N/A | 68538 | 68557 | CCCAGACGATCCACCCCAGA | 64 | 164 |
| 1081081 | N/A | N/A | 70254 | 70273 | CACCGGTATCCCAGTGCCCC | 58 | 165 |
| 1081087 | N/A | N/A | 71072 | 71091 | CAGACGCACCGTCACCCACG | 29 | 166 |
| | | | 71152 | 71171 | | | |
| 1081093 | N/A | N/A | 71174 | 71193 | CGTGTGCACACGCGCCCTGC | 21 | 167 |
| | | | 71294 | 71313 | | | |
| 1081099 | N/A | N/A | 72851 | 72870 | GGCACACGCCATACCTGGGC | 43 | 168 |
| 1081105 | N/A | N/A | 75990 | 76009 | CCCCCATGCCCTACTCGGTC | 49 | 169 |
| 1081111 | N/A | N/A | 77628 | 77647 | GGTGCCTCTAACATAGACAC | 49 | 170 |
| 1081117 | N/A | N/A | 79139 | 79158 | ACAGCTGTACCCACAGGCGG | 52 | 171 |
| 1081123 | N/A | N/A | 83317 | 83336 | CGTCTCTGTATATGCCTGGC | 50 | 172 |
| 1081129 | N/A | N/A | 84931 | 84950 | CGGGTTCGCCCTTACTCATC | 42 | 173 |
| 1081135 | N/A | N/A | 87153 | 87172 | GCTGCCCGTATTCTTCCTGA | 18 | 174 |
| 1081141 | N/A | N/A | 91137 | 91156 | CGCAGGCATCCCACTCATGA | 89 | 175 |
| 1081147 | N/A | N/A | 93676 | 93695 | TCCGGCCTTCCTGACCATTC | 23 | 176 |

TABLE 3
Reduction of KCNT1 RNA by 4,000 nM 5-10-5 MOE gapmers with a mixed backbone measured
with human KCNT1 primer probe set RTS39508

| | SEQ | SEQ | SEQ | SEQ | | | |
|---|---|---|---|---|---|---|---|
| | ID | ID | ID | ID | | | |
| | NO: 1 | NO: 1 | NO: 2 | NO: 2 | | KCNT1 | SEQ |
| Compound | Start | Stop | Start | Stop | | (% | ID |
| Number | Site | Site | Site | Site | Sequence (5′ to 3′) | UTC) | NO |
| 854697 | 1354 | 1373 | 67703 | 67722 | CTGGAGGTAGATGACCCGCT | 48 | 177 |
| 1080687 | 41 | 60 | 4225 | 4244 | CGGACCCGACCCGAGGGAGA | 65 | 178 |
| 1080693 | 79 | 98 | 4263 | 4282 | CCGCGCCCCGTCAGGGAGTG | 68 | 179 |
| 1080699 | 127 | 146 | 4311 | 4330 | GTTGGTGTAGCCCCCGCCGC | 85 | 180 |
| 1080705 | 208 | 227 | 16600 | 16619 | GCCGGCGGTGTCCAGGAGCG | 36 | 181 |
| 1080711 | 237 | 256 | 16629 | 16648 | ACCTCGGAGTCCAGGTCGCT | 43 | 182 |
| 1080717 | 358 | 377 | 52127 | 52146 | GAGCCGCTCCTTGAAGGTGT | 36 | 183 |
| 1080723 | 517 | 536 | 55945 | 55964 | GGAGTAGTTCTGCTTTGGGC | ND | 184 |
| 1080729 | 594 | 613 | 57149 | 57168 | TGGATCGCCCACAGTGTCAT | 41 | 185 |
| 1080735 | 692 | 711 | 59173 | 59192 | CGAAGGACACGCGGAAGATC | 34 | 186 |
| 1080741 | 761 | 780 | 59309 | 59328 | TGAACAGGTTCCGCAGCGGC | 12 | 187 |
| 1080747 | 1012 | 1031 | 61762 | 61781 | GTCACCGTAGCCCACGGTGG | 59 | 188 |
| 1080753 | 1105 | 1124 | 67026 | 67045 | GACGAGCTCCTCGAACTGCA | 23 | 189 |
| 1080759 | 1174 | 1193 | 67095 | 67114 | GTGCTTCTCCGTCTGCGCAC | 43 | 190 |
| 1080770 | 1710 | 1729 | 72314 | 72333 | ATGCGCTGCCACTGCTCCGG | 44 | 191 |
| 1080776 | 1855 | 1874 | 72868 | 72887 | CCGCTTCAGCCCGATGAGGC | 40 | 192 |
| 1080782 | 2163 | 2182 | 74795 | 74814 | GAGCCGTTCTCCGTGGGCAG | 73 | 193 |
| 1080788 | 2208 | 2227 | 74840 | 74859 | TCGGCCAGTTCCAGGACGGG | 60 | 194 |
| 1080794 | 2318 | 2337 | 77310 | 77329 | GAGGGTAGCCCTTCACATAC | 24 | 195 |
| 1080800 | 2474 | 2493 | 79388 | 79407 | CCGAGACGATGATCAGCTTG | 30 | 196 |
| 1080806 | 2484 | 2503 | 79398 | 79417 | GCCGTCTCTGCCGAGACGAT | ND | 197 |
| 1080812 | 2505 | 2524 | 79419 | 79438 | AAGTTGTACAGCCCATTGCC | 50 | 198 |
| 1080818 | 2550 | 2569 | 79464 | 79483 | TTCAGCTCCTTGCGGGATCT | 22 | 199 |
| 1080824 | 3017 | 3036 | 86534 | 86553 | TGTAGTCCTTCACGAAGGAC | 56 | 200 |
| 1080830 | 3107 | 3126 | 86766 | 86785 | ACAGGTCGCCCTCGGTGATT | 48 | 201 |
| 1080836 | 3433 | 3452 | 88378 | 88397 | CCGGCCTGCCTGCTTGGGCG | 45 | 202 |
| 1080842 | 3484 | 3503 | 88429 | 88448 | GCGCCGGTACAGGCTGAGGC | 41 | 203 |
| 1080848 | 3536 | 3555 | 88481 | 88500 | CCAGGTGCTTCATGCGGTTC | 30 | 204 |
| 1080854 | 3850 | 3869 | 94229 | 94248 | CGCTAGTGCCACCGTGTCCT | 22 | 205 |
| 1080860 | 3933 | 3952 | 94312 | 94331 | GGCCCTCCCCCCGCATGAGG | 28 | 206 |
| 1080866 | 4370 | 4389 | 94749 | 94768 | GGACGCACCCCTCTCACATG | 31 | 207 |
| 1080872 | 4484 | 4503 | 94863 | 94882 | GCCCAATGCCCCCTAGATGC | 27 | 208 |
| 1080878 | 4496 | 4515 | 94875 | 94894 | GCACCATCTTCCGCCCAATG | 22 | 209 |
| 1080884 | 4631 | 4650 | 95010 | 95029 | CGGGATCTCGCCTTGCTGAG | 37 | 210 |
| 1080890 | 4700 | 4719 | 95079 | 95098 | GACCGTACAAACCAGTAAGG | 16 | 211 |
| 1080896 | N/A | N/A | 90124 | 90143 | TACCCGATTCATGACATCAC | 19 | 212 |
| 1080902 | N/A | N/A | 90130 | 90149 | CAGGTTTACCCGATTCATGA | 21 | 213 |
| 1080908 | N/A | N/A | 5393 | 5412 | CCCTTAAAGACCATCCGCCC | 41 | 214 |
| 1080914 | N/A | N/A | 7489 | 7508 | CTGGCGGGCCCCACACATCC | 63 | 215 |
| 1080920 | N/A | N/A | 11384 | 11403 | ATGGATTTTCATCACGGCCT | 72 | 216 |
| 1080926 | N/A | N/A | 16248 | 16267 | GCGCACCACTCCTCCCTGAT | 88 | 217 |
| 1080932 | N/A | N/A | 17509 | 17528 | CCTGCCGTACCCTACACGCT | 38 | 218 |
| 1080938 | N/A | N/A | 18670 | 18689 | CGGCACACAACCCATGTGCC | 93 | 219 |
| 1080944 | N/A | N/A | 20551 | 20570 | AGCGGCACTTCCACCTTACC | ND | 220 |
| 1080950 | N/A | N/A | 23042 | 23061 | CCCGACTCCTCCTCGAACCT | 48 | 221 |
| 1080956 | N/A | N/A | 25372 | 25391 | GTGGCATTCCATGTTGACCC | 38 | 222 |
| 1080962 | N/A | N/A | 27294 | 27313 | ACCGTGTTTCTACATAAGCC | ND | 223 |
| 1080968 | N/A | N/A | 30452 | 30471 | GCTGTTACATCCGCAGTGAG | 36 | 224 |
| 1080974 | N/A | N/A | 31098 | 31117 | CCGTGTATACCTGTCTCCCC | 59 | 225 |
| 1080980 | N/A | N/A | 34408 | 34427 | ACAACAAGATCCAGGCACCG | 41 | 226 |
| 1080986 | N/A | N/A | 36386 | 36405 | GGAAGGACAATACCTTCGGC | 29 | 227 |
| 1080992 | N/A | N/A | 38458 | 38477 | TGCCCGGCTCAAACCACCGC | 23 | 228 |
| 1080998 | N/A | N/A | 42854 | 42873 | CGCAGCATCCAAACCCACGG | 39 | 229 |
| 1081004 | N/A | N/A | 45699 | 45718 | CGGCACACACTATAGCCTCG | 36 | 230 |
| 1081010 | N/A | N/A | 48773 | 48792 | TCCGCCCTGACCATCGCCCC | 38 | 231 |
| 1081016 | N/A | N/A | 50478 | 50497 | GGCTCCTATCAATCGAATCT | ND | 232 |
| 1081022 | N/A | N/A | 53235 | 53254 | GGACCCTTCTCCCTACGCTG | 34 | 233 |
| 1081028 | N/A | N/A | 57238 | 57257 | TGGGTTCCCTACTTACTGAG | 23 | 234 |
| | | | 58128 | 58147 | | | |
| 1081034 | N/A | N/A | 60113 | 60132 | ACACCTGTGTCTCGGCTGAG | 48 | 235 |
| | | | 60155 | 60174 | | | |
| | | | 60247 | 60266 | | | |
| 1081040 | N/A | N/A | 61142 | 61161 | GCCAGGTCCCAGATGCTATC | 23 | 236 |
| 1081046 | N/A | N/A | 65273 | 65292 | GCAGCCCACCCTTACCATCG | 45 | 237 |
| 1081052 | N/A | N/A | 66668 | 66687 | CCGGTCTTCCAGGCACTCGC | 19 | 238 |
| 1081058 | N/A | N/A | 67951 | 67970 | ATGGTCCACCCCAGACGATC | 24 | 239 |
| | | | 68547 | 68566 | | | |
| 1081064 | N/A | N/A | 68062 | 68081 | ATGGTCCACCCCAGATGGTC | ND | 240 |
| 1081070 | N/A | N/A | 68509 | 68528 | CAAGAGGGTCCACCATGGAT | 86 | 241 |
| | | | 68565 | 68584 | | | |
| 1081076 | N/A | N/A | 68649 | 68668 | CCGGACAGTCTACCCCAGAC | 22 | 242 |
| 1081082 | N/A | N/A | 70255 | 70274 | CCACCGGTATCCCAGTGCCC | 42 | 243 |
| 1081088 | N/A | N/A | 71073 | 71092 | CCAGACGCACCGTCACCCAC | 48 | 244 |
| | | | 71153 | 71172 | | | |
| 1081094 | N/A | N/A | 71350 | 71369 | ACACAGCTCGCCTAACTGCG | 99 | 245 |
| 1081100 | N/A | N/A | 74164 | 74183 | GGGCAGAGTGCCTACTGCGC | 23 | 246 |
| 1081106 | N/A | N/A | 76774 | 76793 | CCTCGGCATAACACATGGCC | 82 | 247 |
| 1081112 | N/A | N/A | 77773 | 77792 | GATCAGACACCCATGCCGGG | 37 | 248 |
| 1081118 | N/A | N/A | 80495 | 80514 | TCGGCCGGCCACGCCTTACT | 30 | 249 |
| 1081124 | N/A | N/A | 84304 | 84323 | GACTCCTCTCACACACCGGG | 53 | 250 |
| 1081130 | N/A | N/A | 84933 | 84952 | TCCGGGTTCGCCCTTACTCA | 73 | 251 |
| 1081136 | N/A | N/A | 87371 | 87390 | GTGAAGCTGCGATGTTCTGG | 22 | 252 |
| 1081142 | N/A | N/A | 91673 | 91692 | ACCCGCTTCCTAACCCTGCA | 38 | 253 |
| 1081148 | N/A | N/A | 95466 | 95485 | GAGTTCTGTGCCACTGCGGG | 9 | 254 |

TABLE 4
Reduction of KCNT1 RNA by 4,000 nM 5-10-5 MOE gapmers with a mixed backbone measured
with human KCNT1 primer probe set RTS39508

| | SEQ | SEQ | SEQ | SEQ | | | |
|---|---|---|---|---|---|---|---|
| | ID | ID | ID | ID | | | |
| | NO: 1 | NO: 1 | NO: 2 | NO: 2 | | KCNT1 | SEQ |
| Compound | Start | Stop | Start | Stop | | (% | ID |
| Number | Site | Site | Site | Site | Sequence (5′ to 3′) | UTC) | NO |
| 1080688 | 42 | 61 | 4226 | 4245 | TCGGACCCGACCCGAGGGAG | 125 | 255 |
| 1080694 | 80 | 99 | 4264 | 4283 | TCCGCGCCCCGTCAGGGAGT | 56 | 256 |
| 1080700 | 143 | 162 | 4327 | 4346 | CAAACTCGAAGGTCCGGTTG | 93 | 257 |
| 1080706 | 222 | 241 | 16614 | 16633 | TCGCTCATCTTGAAGCCGGC | 19 | 258 |
| 1080712 | 238 | 257 | 16630 | 16649 | CACCTCGGAGTCCAGGTCGC | 42 | 259 |
| 1080718 | 365 | 384 | 52134 | 52153 | ACAGCTTGAGCCGCTCCTTG | 38 | 260 |
| 1080724 | 531 | 550 | 55959 | 55978 | GACGAGTCATTGAAGGAGTA | 40 | 261 |
| 1080730 | 595 | 614 | 57150 | 57169 | CTGGATCGCCCACAGTGTCA | 27 | 262 |
| 1080736 | 698 | 717 | 59179 | 59198 | CCAGGACGAAGGACACGCGG | 47 | 263 |
| 1080742 | 910 | 929 | 60490 | 60509 | CCCCGTGAAAACGAGGCACA | 46 | 264 |
| 1080748 | 1036 | 1055 | 61786 | 61805 | CGATGGCCAGATCTTGGGCG | 43 | 265 |
| 1080754 | 1106 | 1125 | 67027 | 67046 | AGACGAGCTCCTCGAACTGC | 46 | 266 |
| 1080760 | 1175 | 1194 | 67096 | 67115 | CGTGCTTCTCCGTCTGCGCA | 27 | 267 |
| 1080765 | 1491 | 1510 | 70844 | 70863 | TTCACGGCCCAGGCGCGCAG | 71 | 268 |
| 1080771 | 1764 | 1783 | 72368 | 72387 | TTGCTGTCACCCATGCGGAT | 39 | 269 |
| 1080777 | 1888 | 1907 | 72901 | 72920 | CCCCGGGTTCAGCAGGATGC | 48 | 270 |
| 1080783 | 2164 | 2183 | 74796 | 74815 | CGAGCCGTTCTCCGTGGGCA | 30 | 271 |
| 1080789 | 2210 | 2229 | 74842 | 74861 | TGTCGGCCAGTTCCAGGACG | 85 | 272 |
| 1080795 | 2319 | 2338 | 77311 | 77330 | GGAGGGTAGCCCTTCACATA | 28 | 273 |
| 1080801 | 2475 | 2494 | 79389 | 79408 | GCCGAGACGATGATCAGCTT | 36 | 274 |
| 1080807 | 2486 | 2505 | 79400 | 79419 | CGGCCGTCTCTGCCGAGACG | 44 | 275 |
| 1080813 | 2512 | 2531 | 79426 | 79445 | CACGATGAAGTTGTACAGCC | 28 | 276 |
| 1080819 | 2689 | 2708 | 80708 | 80727 | GTCCGCATAGATGATGCCAC | 15 | 277 |
| 1080825 | 3018 | 3037 | 86535 | 86554 | ATGTAGTCCTTCACGAAGGA | 38 | 278 |
| 1080831 | 3114 | 3133 | 86773 | 86792 | CGGATCCACAGGTCGCCCTC | 25 | 279 |
| 1080837 | 3458 | 3477 | 88403 | 88422 | GGCTGATCCACTCCGCGGCC | 53 | 280 |
| 1080843 | 3522 | 3541 | 88467 | 88486 | CGGTTCTTCACCAGCTCGGA | 45 | 281 |
| 1080849 | 3663 | 3682 | 94042 | 94061 | GGGTCGGAGCGGATGAGATA | 29 | 282 |
| 1080855 | 3854 | 3873 | 94233 | 94252 | GTCACGCTAGTGCCACCGTG | 22 | 283 |
| 1080861 | 3934 | 3953 | 94313 | 94332 | TGGCCCTCCCCCCGCATGAG | 43 | 284 |
| 1080867 | 4371 | 4390 | 94750 | 94769 | GGGACGCACCCCTCTCACAT | 32 | 285 |
| 1080873 | 4486 | 4505 | 94865 | 94884 | CCGCCCAATGCCCCCTAGAT | 53 | 286 |
| 1080879 | 4497 | 4516 | 94876 | 94895 | TGCACCATCTTCCGCCCAAT | 34 | 287 |
| 1080885 | 4632 | 4651 | 95011 | 95030 | CCGGGATCTCGCCTTGCTGA | 46 | 288 |
| 1080891 | 4702 | 4721 | 95081 | 95100 | CTGACCGTACAAACCAGTAA | 25 | 289 |
| 1080897 | N/A | N/A | 90125 | 90144 | TTACCCGATTCATGACATCA | 38 | 290 |
| 1080903 | N/A | N/A | 90131 | 90150 | CCAGGTTTACCCGATTCATG | 26 | 291 |
| 1080909 | N/A | N/A | 6181 | 6200 | GGTTCTGACCACGCTGTTGC | 79 | 292 |
| 1080915 | N/A | N/A | 7601 | 7620 | AAGATGCCCATTTAACCGGG | 84 | 293 |
| 1080921 | N/A | N/A | 11439 | 11458 | AACTTGGAACCTCTACCTGG | 71 | 294 |
| 1080927 | N/A | N/A | 16963 | 16982 | CCTCCGCGCCCCAAGTCGGG | 33 | 295 |
| 1080933 | N/A | N/A | 17641 | 17660 | CCTGACCATTTTCAACCTCG | 33 | 296 |
| 1080939 | N/A | N/A | 19044 | 19063 | TGTCCTATAGACACCAACAC | 61 | 297 |
| 1080945 | N/A | N/A | 21696 | 21715 | ACGAAGCTTCCTCTTGCCTG | 51 | 298 |
| 1080951 | N/A | N/A | 24071 | 24090 | GACACCGTTCACATGTGATG | 30 | 299 |
| 1080957 | N/A | N/A | 25510 | 25529 | CCTTCGGGAGCCACACGCTC | 61 | 300 |
| 1080963 | N/A | N/A | 28340 | 28359 | GGGTACGGCCTCATCCAGGT | 45 | 301 |
| 1080969 | N/A | N/A | 30456 | 30475 | GGTGGCTGTTACATCCGCAG | 38 | 302 |
| 1080975 | N/A | N/A | 31586 | 31605 | GTAACGAACCACCACCAGCC | 68 | 303 |
| 1080981 | N/A | N/A | 34524 | 34543 | AGCCCACACGCCATACAGTT | 74 | 304 |
| 1080987 | N/A | N/A | 36895 | 36914 | CTGCAGGGCCCTTCACCGCG | 45 | 305 |
| 1080993 | N/A | N/A | 38783 | 38802 | CCCGCGCGCCCCTACCTCTG | 39 | 306 |
| 1080999 | N/A | N/A | 43235 | 43254 | CCCGATATAGCCCTAGCTGA | 55 | 307 |
| 1081005 | N/A | N/A | 46620 | 46639 | GCCCCGTCCCTACACGGCTG | 55 | 308 |
| 1081011 | N/A | N/A | 48803 | 48822 | GGCCACTCCTCCTAGGCGGG | 47 | 309 |
| 1081017 | N/A | N/A | 50894 | 50913 | AGTCGGCTGCCTTAGCCCTC | 38 | 310 |
| 1081023 | N/A | N/A | 55659 | 55678 | AGGGTACATCCCACATCTGC | 17 | 311 |
| 1081029 | N/A | N/A | 58506 | 58525 | ACCTGGTTTTCCCCCACGGA | 48 | 312 |
| 1081035 | N/A | N/A | 60114 | 60133 | CACACCTGTGTCTCGGCTGA | 45 | 313 |
| | | | 60156 | 60175 | | | |
| | | | 60248 | 60267 | | | |
| 1081041 | N/A | N/A | 61207 | 61226 | CGGCACAGCCAGACAAGCGC | 43 | 314 |
| 1081047 | N/A | N/A | 65470 | 65489 | CGGAGGATACATATCTGCTG | 33 | 315 |
| 1081053 | N/A | N/A | 67263 | 67282 | GGGACTTGCCAAGCAGTCCT | 72 | 316 |
| | | | 67384 | 67403 | | | |
| 1081059 | N/A | N/A | 67955 | 67974 | CTGAATGGTCCACCCCAGAC | 52 | 317 |
| | | | 68094 | 68113 | | | |
| 1081065 | N/A | N/A | 68143 | 68162 | ATCCACCCTGGATGGTCCAC | 34 | 318 |
| | | | 68366 | 68385 | | | |
| 1081071 | N/A | N/A | 68513 | 68532 | CACCCAAGAGGGTCCACCAT | 85 | 319 |
| | | | 68569 | 68588 | | | |
| 1081077 | N/A | N/A | 68940 | 68959 | GGAACTCTACCTTCAGCCCG | 55 | 320 |
| 1081083 | N/A | N/A | 70954 | 70973 | CAGATACACCATCACCCACG | 87 | 321 |
| 1081089 | N/A | N/A | 71076 | 71095 | GCCCCAGACGCACCGTCACC | 26 | 322 |
| | | | 71156 | 71175 | | | |
| 1081095 | N/A | N/A | 71738 | 71757 | GGTGGACCTTCCATCGCTCC | 30 | 323 |
| 1081101 | N/A | N/A | 74408 | 74427 | GGTTGGCTGATTCTGGGCTC | 38 | 324 |
| 1081107 | N/A | N/A | 76923 | 76942 | GGACTTAGCCCCATCAGGGC | 19 | 325 |
| 1081113 | N/A | N/A | 78059 | 78078 | GTGACCTGACAATTGACCCC | 67 | 326 |
| 1081119 | N/A | N/A | 81776 | 81795 | GACCAACTGACCATGCCAGG | 53 | 327 |
| 1081125 | N/A | N/A | 84520 | 84539 | CGGATGAGCCCTTCCTGAGC | 60 | 328 |
| 1081131 | N/A | N/A | 85101 | 85120 | GGGTCATTCTTCAGCGGAGG | 50 | 329 |
| 1081137 | N/A | N/A | 88514 | 88533 | GTGTGCCCTTACCGTAGCCG | 34 | 330 |
| 1081143 | N/A | N/A | 91674 | 91693 | AACCCGCTTCCTAACCCTGC | 76 | 331 |
| 1081149 | N/A | N/A | 96183 | 96202 | TGCGACTCCCCCATGGTGCC | 72 | 332 |

TABLE 5
Reduction of KCNT1 RNA by 4,000 nM 5-10-5 MOE gapmers with a mixed backbone measured
with human KCNT1 primer probe set RTS39508

| | SEQ | SEQ | SEQ | SEQ | | | |
|---|---|---|---|---|---|---|---|
| | ID | ID | ID | ID | | | |
| | NO: 1 | NO: 1 | NO: 2 | NO: 2 | | KCNT1 | SEQ |
| Compound | Start | Stop | Start | Stop | | (% | ID |
| Number | Site | Site | Site | Site | Sequence (5′ to 3′) | UTC) | NO |
| 1080689 | 45 | 64 | 4229 | 4248 | AGCTCGGACCCGACCCGAGG | 97 | 333 |
| 1080695 | 81 | 100 | 4265 | 4284 | GTCCGCGCCCCGTCAGGGAG | 76 | 334 |
| 1080701 | 146 | 165 | 4330 | 4349 | CGTCAAACTCGAAGGTCCGG | 102 | 335 |
| 1080707 | 223 | 242 | 16615 | 16634 | GTCGCTCATCTTGAAGCCGG | 25 | 336 |
| 1080713 | 327 | 346 | 52096 | 52115 | TAGAACTCCACCTGGACCCT | 36 | 337 |
| 1080719 | 417 | 436 | 52950 | 52969 | GAGAAGTTGAACAGCCGGAT | 48 | 338 |
| 1080725 | 535 | 554 | 55963 | 55982 | GGAGGACGAGTCATTGAAGG | 45 | 339 |
| 1080731 | 597 | 616 | 57152 | 57171 | ACCTGGATCGCCCACAGTGT | 31 | 340 |
| 1080737 | 706 | 725 | 59187 | 59206 | GATCATCTCCAGGACGAAGG | 43 | 341 |
| 1080743 | 928 | 947 | 61678 | 61697 | GTGCTGGATGCCGCAGGTCC | 33 | 342 |
| 1080749 | 1066 | 1085 | 61816 | 61835 | CACGCAGATCATGATGACCA | 55 | 343 |
| 1080755 | 1114 | 1133 | 67035 | 67054 | CCAGAGGTAGACGAGCTCCT | 33 | 344 |
| 1080761 | 1210 | 1229 | 67131 | 67150 | AAGGTCGATCTTGAGGGAGC | 36 | 345 |
| 1080766 | 1493 | 1512 | 70846 | 70865 | CCTTCACGGCCCAGGCGCGC | 43 | 346 |
| 1080772 | 1776 | 1795 | 72380 | 72399 | TCGCGGAAGAACTTGCTGTC | 50 | 347 |
| 1080778 | 1954 | 1973 | 72967 | 72986 | CGAGTTCTCCTCCTTGGTGA | 39 | 348 |
| 1080784 | 2175 | 2194 | 74807 | 74826 | CGCCGGCTGCCCGAGCCGTT | 54 | 349 |
| 1080790 | 2213 | 2232 | 74845 | 74864 | AGCTGTCGGCCAGTTCCAGG | 56 | 350 |
| 1080796 | 2454 | 2473 | 79368 | 79387 | TTCTTGAACCCGTAGGCCTT | 44 | 351 |
| 1080802 | 2476 | 2495 | 79390 | 79409 | TGCCGAGACGATGATCAGCT | 31 | 352 |
| 1080808 | 2490 | 2509 | 79404 | 79423 | TTGCCGGCCGTCTCTGCCGA | 46 | 353 |
| 1080814 | 2518 | 2537 | 79432 | 79451 | CAGTGGCACGATGAAGTTGT | 44 | 354 |
| 1080820 | 2696 | 2715 | 80715 | 80734 | CCAGGTTGTCCGCATAGATG | 33 | 355 |
| 1080826 | 3020 | 3039 | 86537 | 86556 | TCATGTAGTCCTTCACGAAG | 67 | 356 |
| 1080832 | 3117 | 3136 | 86776 | 86795 | GTGCGGATCCACAGGTCGCC | 41 | 357 |
| 1080838 | 3459 | 3478 | 88404 | 88423 | TGGCTGATCCACTCCGCGGC | 37 | 358 |
| 1080844 | 3523 | 3542 | 88468 | 88487 | GCGGTTCTTCACCAGCTCGG | 18 | 359 |
| 1080850 | 3732 | 3751 | 94111 | 94130 | TTGCAGGACGACAGCTTGTG | 50 | 360 |
| 1080856 | 3859 | 3878 | 94238 | 94257 | CCAGGGTCACGCTAGTGCCA | 25 | 361 |
| 1080862 | 4032 | 4051 | 94411 | 94430 | GTTGCGGTACATCTGTGTAA | 8 | 362 |
| 1080868 | 4414 | 4433 | 94793 | 94812 | CCTTCAGAAAGGTCCTCGGC | 29 | 363 |
| 1080874 | 4491 | 4510 | 94870 | 94889 | ATCTTCCGCCCAATGCCCCC | 42 | 364 |
| 1080880 | 4498 | 4517 | 94877 | 94896 | ATGCACCATCTTCCGCCCAA | 27 | 365 |
| 1080886 | 4634 | 4653 | 95013 | 95032 | GCCCGGGATCTCGCCTTGCT | 28 | 366 |
| 1080892 | 4703 | 4722 | 95082 | 95101 | GCTGACCGTACAAACCAGTA | 14 | 367 |
| 1080898 | N/A | N/A | 90126 | 90145 | TTTACCCGATTCATGACATC | 46 | 368 |
| 1080904 | N/A | N/A | 2853 | 2872 | CCCCAGATCGCCAGCCCGTC | 76 | 369 |
| 1080910 | N/A | N/A | 6210 | 6229 | GCACCAAGACCTATGGACTC | 87 | 370 |
| 1080916 | N/A | N/A | 8477 | 8496 | GGCGACGGTGCCAAGGAGGA | 64 | 371 |
| 1080922 | N/A | N/A | 12789 | 12808 | GAGCGCATCACTATTTTCTC | 88 | 372 |
| 1080928 | N/A | N/A | 17266 | 17285 | TGGGCTCATCCTGTTGGTCC | 35 | 373 |
| 1080934 | N/A | N/A | 17803 | 17822 | TAGAATATTCCATTCCCCGC | 35 | 374 |
| 1080940 | N/A | N/A | 19220 | 19239 | CTCATCCTATAGACACCAAC | 37 | 375 |
| | | | 19266 | 19285 | | | |
| 1080946 | N/A | N/A | 22380 | 22399 | ACTTCCCCGACCAGCTGAGA | 68 | 376 |
| 1080952 | N/A | N/A | 24243 | 24262 | GCGGGATTCGCCCTCTCAGG | 18 | 377 |
| 1080958 | N/A | N/A | 26459 | 26478 | CCCTCGCCGACCACTGGCCT | 24 | 378 |
| 1080964 | N/A | N/A | 28499 | 28518 | CAGGTTCTACCTACCAAGGG | 28 | 379 |
| 1080970 | N/A | N/A | 30784 | 30803 | ATCACCATAACCAGACCCGG | 35 | 380 |
| 1080976 | N/A | N/A | 31773 | 31792 | TGCAACATTTTCAAGCCTCG | 24 | 381 |
| 1080982 | N/A | N/A | 34618 | 34637 | GCAATGGAAGCCACACTCGA | 44 | 382 |
| 1080988 | N/A | N/A | 37260 | 37279 | GCGCTCCCGATACCTGCCCT | 39 | 383 |
| 1080994 | N/A | N/A | 39863 | 39882 | TTGACCTTAGCCTCAACCGC | 65 | 384 |
| 1081000 | N/A | N/A | 43695 | 43714 | TCGGCCTACGCCAGGCTCTC | 57 | 385 |
| 1081006 | N/A | N/A | 46984 | 47003 | GGGCGCAGCCACACACTCGC | 28 | 386 |
| 1081012 | N/A | N/A | 49047 | 49066 | GGGTGACTTCCCAACTGGCT | 41 | 387 |
| 1081018 | N/A | N/A | 51273 | 51292 | TGGCTCACCTACCGTGGCCA | 77 | 388 |
| 1081024 | N/A | N/A | 55801 | 55820 | GGGCTAACCCCCACATCAGA | 38 | 389 |
| 1081030 | N/A | N/A | 58944 | 58963 | CTGTGAGGTGCCATCCCGGG | 68 | 390 |
| 1081036 | N/A | N/A | 60146 | 60165 | TCTCGGCTGAGGCCCACGGG | 38 | 391 |
| | | | 60192 | 60211 | | | |
| | | | 60284 | 60303 | | | |
| 1081042 | N/A | N/A | 63494 | 63513 | GGTGAGATTTACGGATTGGG | 29 | 392 |
| 1081048 | N/A | N/A | 65546 | 65565 | ACAATCTCCCCCAAAGCGGC | 23 | 393 |
| 1081054 | N/A | N/A | 67914 | 67933 | CCCGGACGATCCACCCTGGA | 45 | 394 |
| 1081060 | N/A | N/A | 67956 | 67975 | CCTGAATGGTCCACCCCAGA | 52 | 395 |
| | | | 68095 | 68114 | | | |
| 1081066 | N/A | N/A | 68154 | 68173 | CACCCTAGACAATCCACCCT | 53 | 396 |
| 1081072 | N/A | N/A | 68515 | 68534 | TCCACCCAAGAGGGTCCACC | 29 | 397 |
| | | | 68571 | 68590 | | | |
| 1081078 | N/A | N/A | 69277 | 69296 | ATGGCCTACGCCCTTGCCCT | 48 | 398 |
| 1081084 | N/A | N/A | 71037 | 71056 | TGCCCCAGACGCACCGTCAC | 32 | 399 |
| | | | 71077 | 71096 | | | |
| | | | 71157 | 71176 | | | |
| 1081090 | N/A | N/A | 71165 | 71184 | ACGCGCCCTGCCCCAGACGC | 34 | 400 |
| | | | 71285 | 71304 | | | |
| 1081096 | N/A | N/A | 71768 | 71787 | GACCTCAACCCCCTACTTGG | 82 | 401 |
| 1081102 | N/A | N/A | 74644 | 74663 | CGGCGAGTTCCCAGAGCTCA | 43 | 402 |
| 1081108 | N/A | N/A | 77143 | 77162 | CCGTTCTTCCCTTAACCACC | 38 | 403 |
| 1081114 | N/A | N/A | 78693 | 78712 | CCGGCCACAGATTATAACCC | 60 | 404 |
| 1081120 | N/A | N/A | 81784 | 81803 | GGAGTTCTGACCAACTGACC | 63 | 405 |
| 1081126 | N/A | N/A | 84783 | 84802 | GCATCCAGAATTCCAGCCGT | 32 | 406 |
| 1081132 | N/A | N/A | 86404 | 86423 | GCTCGCCACCCCTCATGCAT | 42 | 407 |
| 1081138 | N/A | N/A | 88517 | 88536 | GCCGTGTGCCCTTACCGTAG | 40 | 408 |
| 1081144 | N/A | N/A | 91686 | 91705 | TGCTCGCCCCCCAACCCGCT | 48 | 409 |
| 1081150 | N/A | N/A | 96608 | 96627 | GGGAGGATTCACAGGCCGCT | 41 | 410 |

TABLE 6
Reduction of KCNT1 RNA by 4,000 nM 5-10-5 MOE gapmers with a mixed backbone measured
with human KCNT1 primer probe set RTS39508

| | SEQ | SEQ | SEQ | SEQ | | | |
|---|---|---|---|---|---|---|---|
| | ID | ID | ID | ID | | | |
| | NO: 1 | NO: 1 | NO: 2 | NO: 2 | | KCNT1 | SEQ |
| Compound | Start | Stop | Start | Stop | | (% | ID |
| Number | Site | Site | Site | Site | Sequence (5′ to 3′) | UTC) | NO |
| 1080690 | 46 | 65 | 4230 | 4249 | CAGCTCGGACCCGACCCGAG | 74 | 411 |
| 1080696 | 121 | 140 | 4305 | 4324 | GTAGCCCCCGCCGCGCGCCT | 53 | 412 |
| 1080702 | 191 | 210 | 16583 | 16602 | GCGCGCCGTCCCCCGCGCAG | 76 | 413 |
| 1080708 | 225 | 244 | 16617 | 16636 | AGGTCGCTCATCTTGAAGCC | 47 | 414 |
| 1080714 | 328 | 347 | 52097 | 52116 | GTAGAACTCCACCTGGACCC | 46 | 415 |
| 1080720 | 457 | 476 | 52990 | 53009 | GACGCGCACAATGTAGAGCA | 40 | 416 |
| 1080726 | 547 | 566 | 55975 | 55994 | CCAGTTGATCTCGGAGGACG | 50 | 417 |
| 1080732 | 611 | 630 | 58869 | 58888 | TTATGGCCACGATGACCTGG | 52 | 418 |
| 1080738 | 708 | 727 | 59189 | 59208 | TTGATCATCTCCAGGACGAA | 71 | 419 |
| 1080744 | 948 | 967 | 61698 | 61717 | TTCTCGCCCGCCCGCTCCAG | 66 | 420 |
| 1080750 | 1067 | 1086 | 61817 | 61836 | CCACGCAGATCATGATGACC | 57 | 421 |
| 1080756 | 1123 | 1142 | 67044 | 67063 | CCGCTCCATCCAGAGGTAGA | 52 | 422 |
| 1080762 | 1214 | 1233 | 67135 | 67154 | TGAGAAGGTCGATCTTGAGG | 75 | 423 |
| 1080767 | 1494 | 1513 | 70847 | 70866 | TCCTTCACGGCCCAGGCGCG | 49 | 424 |
| 1080773 | 1778 | 1797 | 72382 | 72401 | ACTCGCGGAAGAACTTGCTG | 45 | 425 |
| 1080779 | 1955 | 1974 | 72968 | 72987 | CCGAGTTCTCCTCCTTGGTG | 26 | 426 |
| 1080785 | 2176 | 2195 | 74808 | 74827 | CCGCCGGCTGCCCGAGCCGT | 40 | 427 |
| 1080791 | 2261 | 2280 | 74893 | 74912 | CCTCATCCTCCGACTGGTCG | 38 | 428 |
| 1080797 | 2455 | 2474 | 79369 | 79388 | GTTCTTGAACCCGTAGGCCT | 35 | 429 |
| 1080803 | 2477 | 2496 | 79391 | 79410 | CTGCCGAGACGATGATCAGC | 34 | 430 |
| 1080809 | 2502 | 2521 | 79416 | 79435 | TTGTACAGCCCATTGCCGGC | 46 | 431 |
| 1080815 | 2519 | 2538 | 79433 | 79452 | GCAGTGGCACGATGAAGTTG | 61 | 432 |
| 1080821 | 2954 | 2973 | 86062 | 86081 | CGGCGGCGAACGGCAGGCGG | 27 | 433 |
| 1080827 | 3037 | 3056 | 86554 | 86573 | CAGCCGGGTGATGGTGATCA | 52 | 434 |
| 1080833 | 3118 | 3137 | 86777 | 86796 | CGTGCGGATCCACAGGTCGC | 44 | 435 |
| 1080839 | 3461 | 3480 | 88406 | 88425 | GCTGGCTGATCCACTCCGCG | 53 | 436 |
| 1080845 | 3524 | 3543 | 88469 | 88488 | TGCGGTTCTTCACCAGCTCG | 48 | 437 |
| 1080851 | 3840 | 3859 | 94219 | 94238 | ACCGTGTCCTCACACGCTCC | 19 | 438 |
| 1080857 | 3861 | 3880 | 94240 | 94259 | CCCCAGGGTCACGCTAGTGC | 25 | 439 |
| 1080863 | 4033 | 4052 | 94412 | 94431 | AGTTGCGGTACATCTGTGTA | 23 | 440 |
| 1080869 | 4456 | 4475 | 94835 | 94854 | GGACAGTTCAGTGTGAAGTA | 47 | 441 |
| 1080875 | 4492 | 4511 | 94871 | 94890 | CATCTTCCGCCCAATGCCCC | 42 | 442 |
| 1080881 | 4501 | 4520 | 94880 | 94899 | GAAATGCACCATCTTCCGCC | 39 | 443 |
| 1080887 | 4641 | 4660 | 95020 | 95039 | AGCCGCCGCCCGGGATCTCG | 55 | 444 |
| 1080893 | 4704 | 4723 | 95083 | 95102 | CGCTGACCGTACAAACCAGT | 39 | 445 |
| 1080899 | N/A | N/A | 90127 | 90146 | GTTTACCCGATTCATGACAT | 38 | 446 |
| 1080905 | N/A | N/A | 3435 | 3454 | GGAGAACTGCGATTTCTGTC | 88 | 447 |
| 1080911 | N/A | N/A | 6282 | 6301 | CCCCTCTGAACCATAGCACC | 91 | 448 |
| 1080917 | N/A | N/A | 8832 | 8851 | AATGACCAACTCACTGGCGC | 40 | 449 |
| | | | 37276 | 37295 | | | |
| 1080923 | N/A | N/A | 12935 | 12954 | CGCGGGAGCCCCAAACCCAC | 63 | 450 |
| 1080929 | N/A | N/A | 17285 | 17304 | AGCGGATGAATTATTCCCAT | 30 | 451 |
| 1080935 | N/A | N/A | 17804 | 17823 | GTAGAATATTCCATTCCCCG | 32 | 452 |
| 1080941 | N/A | N/A | 19315 | 19334 | TGTCCCATCCTATAGACACC | 47 | 453 |
| 1080947 | N/A | N/A | 22762 | 22781 | CACTCACGCCTTCACGCAGA | 52 | 454 |
| 1080953 | N/A | N/A | 24432 | 24451 | TGGTGGCTTCCTGACGCGGA | 48 | 455 |
| 1080959 | N/A | N/A | 26473 | 26492 | CAGACTGGCCACGCCCCTCG | 56 | 456 |
| 1080965 | N/A | N/A | 29889 | 29908 | CACTCGCCTTTTTAGAGCCC | 44 | 457 |
| 1080971 | N/A | N/A | 30872 | 30891 | TCTCAGATTCACAATCCCGG | 30 | 458 |
| 1080977 | N/A | N/A | 32351 | 32370 | CCCCCTCGCCACGCATGGTT | 28 | 459 |
| 1080983 | N/A | N/A | 34970 | 34989 | GCCGGAATCCTCACCCTTAG | 38 | 460 |
| 1080989 | N/A | N/A | 37589 | 37608 | CCGGCCCGCCCCAAACTCAC | 54 | 461 |
| 1080995 | N/A | N/A | 40432 | 40451 | CGTGAGATCCACACTCCAGA | 36 | 462 |
| 1081001 | N/A | N/A | 44414 | 44433 | GGTGACAACCACACTCGAGG | 32 | 463 |
| 1081007 | N/A | N/A | 47083 | 47102 | GGGAACATCGCCATTCCCAG | 78 | 464 |
| 1081013 | N/A | N/A | 49373 | 49392 | CCACCGGGCCCTAAAAGCAT | 83 | 465 |
| 1081019 | N/A | N/A | 52235 | 52254 | TTCGCCATCGCCAGGCTTGC | 40 | 466 |
| 1081025 | N/A | N/A | 56008 | 56027 | CGCCTGGCTATTGGGAGCTG | 40 | 467 |
| | | | 56072 | 56091 | | | |
| 1081031 | N/A | N/A | 59374 | 59393 | GCCCCGGCTTACAATCATGT | 63 | 468 |
| 1081037 | N/A | N/A | 60147 | 60166 | GTCTCGGCTGAGGCCCACGG | 30 | 469 |
| | | | 60193 | 60212 | | | |
| | | | 60285 | 60304 | | | |
| 1081043 | N/A | N/A | 64874 | 64893 | ATGGCCATACCCATCGATGC | 22 | 470 |
| 1081049 | N/A | N/A | 65596 | 65615 | AAGCAGCCCCAGGGATTGCG | 28 | 471 |
| 1081055 | N/A | N/A | 67917 | 67936 | CACCCCGGACGATCCACCCT | 52 | 472 |
| 1081061 | N/A | N/A | 67958 | 67977 | ACCCTGAATGGTCCACCCCA | 49 | 473 |
| | | | 68097 | 68116 | | | |
| 1081067 | N/A | N/A | 68342 | 68361 | GAGATCCATCCCAGATGGTT | 58 | 474 |
| 1081073 | N/A | N/A | 68516 | 68535 | GTCCACCCAAGAGGGTCCAC | 29 | 475 |
| | | | 68572 | 68591 | | | |
| 1081079 | N/A | N/A | 69658 | 69677 | GGTGGAGACCCCACCTAGGT | 46 | 476 |
| 1081085 | N/A | N/A | 71038 | 71057 | CTGCCCCAGACGCACCGTCA | 21 | 477 |
| | | | 71078 | 71097 | | | |
| | | | 71158 | 71177 | | | |
| 1081091 | N/A | N/A | 71166 | 71185 | CACGCGCCCTGCCCCAGACG | 73 | 478 |
| | | | 71286 | 71305 | | | |
| 1081097 | N/A | N/A | 72438 | 72457 | CCGGCCTTACTTCTTGTGGG | 66 | 479 |
| 1081103 | N/A | N/A | 74938 | 74957 | GCACTCACTCTACCACGGAG | 79 | 480 |
| 1081109 | N/A | N/A | 77306 | 77325 | GTAGCCCTTCACATACCTGG | 64 | 481 |
| 1081115 | N/A | N/A | 78899 | 78918 | GTGGTTCATTCCAGACTGGA | 42 | 482 |
| 1081121 | N/A | N/A | 81950 | 81969 | GTCCCTTGTCAATACAAGGA | 59 | 483 |
| 1081127 | N/A | N/A | 84926 | 84945 | TCGCCCTTACTCATCAGTGG | 50 | 484 |
| 1081133 | N/A | N/A | 86428 | 86447 | AGGTCCATACCCCACCGGCC | 39 | 485 |
| 1081139 | N/A | N/A | 89027 | 89046 | GGTCCCCACCAGTCTTGTTC | 49 | 486 |
| 1081145 | N/A | N/A | 91719 | 91738 | TCCGACCTTTACTCCAGGCC | 21 | 487 |
| 1081151 | N/A | N/A | 96762 | 96781 | CGGGTGCTCCCTAAACCTGG | 71 | 488 |

TABLE 7
Reduction of KCNT1 RNA by 4,000 nM 5-10-5 MOE gapmers with a mixed backbone measured
with human KCNT1 primer probe set RTS39496

| | SEQ | SEQ | SEQ | SEQ | | | |
|---|---|---|---|---|---|---|---|
| | ID | ID | ID | ID | | | |
| | NO: 1 | NO: 1 | NO: 2 | NO: 2 | | KCNT1 | SEQ |
| Compound | Start | Stop | Start | Stop | | (% | ID |
| Number | Site | Site | Site | Site | Sequence (5′ to 3′) | UTC) | No. |
| 1080855 | 3854 | 3873 | 94233 | 94252 | GTCACGCTAGTGCCACCGTG | 24 | 283 |
| 1337234 | N/A | N/A | 18642 | 18661 | ACAGCACGCCAAGACCGCTA | 28 | 489 |
| 1337247 | N/A | N/A | 22973 | 22992 | CGTGCCCCACCCTCACCTTT | 33 | 490 |
| 1337271 | N/A | N/A | 25733 | 25752 | ACTGGCAGAATCATCAGTAA | 49 | 491 |
| 1337272 | N/A | N/A | 31118 | 31137 | AGCGAACTTAATTATATCTC | 31 | 492 |
| 1337277 | N/A | N/A | 67945 | 67964 | CACCCCAGACGATCCACCCT | 51 | 493 |
| 1337307 | N/A | N/A | 48755 | 48774 | CCACACTCCACTCCAAGGCA | 31 | 494 |
| 1337319 | N/A | N/A | 19177 | 19196 | CTCCCATCCTATACACACCA | 41 | 495 |
| 1337323 | N/A | N/A | 47075 | 47094 | CGCCATTCCCAGAGTCCACA | 31 | 496 |
| 1337325 | N/A | N/A | 66012 | 66031 | GCCTTGCCACACAAAACAGT | 43 | 497 |
| 1337327 | N/A | N/A | 87839 | 87858 | AGCACATCCTGGCCTTGCCC | 12 | 498 |
| 1337332 | N/A | N/A | 54378 | 54397 | GGTTCTGCCCTCTTCTGACC | 9 | 499 |
| 1337337 | N/A | N/A | 19881 | 19900 | GACTCACCCAACCCTACCAT | 58 | 500 |
| 1337378 | N/A | N/A | 42262 | 42281 | CCACACGCAACAAAGGCACC | 40 | 501 |
| 1337473 | N/A | N/A | 33706 | 33725 | GATGACGGTCCCATGCTGAT | 30 | 502 |
| 1337479 | N/A | N/A | 44857 | 44876 | CTCTCACACCTCTAAGAGCC | 68 | 503 |
| 1337515 | N/A | N/A | 40232 | 40251 | GCGAGGCCACCCATGTGAAA | 48 | 504 |
| 1337557 | N/A | N/A | 31679 | 31698 | AGCTGAACCACCCACAGAGA | 61 | 505 |
| 1337565 | N/A | N/A | 73927 | 73946 | CACCGTGTAACAACACCCCA | 36 | 506 |
| 1337570 | N/A | N/A | 22293 | 22312 | ACCGCAACCCCTTCTGCTTG | 32 | 507 |
| 1337582 | N/A | N/A | 18187 | 18206 | CTGCCGTTTTCAAGAATTAA | 28 | 508 |
| 1337624 | N/A | N/A | 34958 | 34977 | ACCCTTAGCCCTCATCAGGA | 45 | 509 |
| 1337658 | N/A | N/A | 17714 | 17733 | GACTCTAGTTACAAACATGA | 30 | 510 |
| 1337674 | N/A | N/A | 48074 | 48093 | ACGATCCATTTTCCCCTGCA | 28 | 511 |
| 1337696 | N/A | N/A | 86209 | 86228 | AGAGGGAGTCCTATCATTCA | 32 | 512 |
| 1337729 | N/A | N/A | 29630 | 29649 | CCTGGTGCCACACCTCCCTT | 31 | 513 |
| 1337790 | N/A | N/A | 37484 | 37503 | CCTCCATGCACCCGTGCCAC | 31 | 514 |
| 1337831 | N/A | N/A | 62061 | 62080 | TCACGGGACTCCATCATTAC | 37 | 515 |
| 1337853 | N/A | N/A | 76382 | 76401 | CGGACACACAACATACGCAA | 61 | 516 |
| 1337856 | N/A | N/A | 32675 | 32694 | GTTTTAAGCACACCATCCCG | 57 | 517 |
| 1337871 | N/A | N/A | 93318 | 93337 | CTTCATAGCAACCCATGCCT | 36 | 518 |
| 1337874 | N/A | N/A | 68280 | 68299 | CACCCTGGACAGTCTACCCT | 43 | 519 |
| 1337896 | N/A | N/A | 62937 | 62956 | GAAAGCCACACACAACTGGC | 27 | 520 |
| 1337952 | N/A | N/A | 81978 | 81997 | GGCAGGCCCCTTCCCTCTCA | 36 | 521 |
| 1337988 | N/A | N/A | 55656 | 55675 | GTACATCCCACATCTGCGGG | 21 | 522 |
| 1337990 | N/A | N/A | 24539 | 24558 | GGCATAAACACACTTACACC | 35 | 523 |
| 1338022 | N/A | N/A | 21423 | 21442 | CCCCCGACATACACAGCATC | 40 | 524 |
| 1338028 | N/A | N/A | 39245 | 39264 | ACCAGCCCAAGCATACCCCA | 43 | 525 |
| 1338062 | N/A | N/A | 27209 | 27228 | GGAGTACTCTCCACAGACCC | 23 | 526 |
| 1338153 | N/A | N/A | 78619 | 78638 | GGAGGTCCCCTCCGTGGCCG | 53 | 527 |
| 1338221 | N/A | N/A | 89346 | 89365 | GCCCATGGCTTCATCAACGG | 24 | 528 |
| 1338284 | N/A | N/A | 82786 | 82805 | GAACACAGAATCCTGTGAAC | 51 | 529 |
| 1338312 | N/A | N/A | 53236 | 53255 | GGGACCCTTCTCCCTACGCT | 14 | 530 |
| 1338327 | N/A | N/A | 71160 | 71179 | CCCTGCCCCAGACGCACCGT | 26 | 531 |
| 1338371 | N/A | N/A | 75708 | 75727 | TTGACCCCACCCCAGAGGCA | 56 | 532 |
| 1338380 | N/A | N/A | 58395 | 58414 | ACCCAGTCATGAACTAGGTC | 25 | 533 |
| 1338411 | N/A | N/A | 68885 | 68904 | GCCCCTGTTCTATTTTGAGC | 64 | 534 |
| 1338472 | N/A | N/A | 43184 | 43203 | TCTACTCTGCCCAAGGCCCT | 52 | 535 |
| 1338475 | 3837 | 3856 | 94216 | 94235 | GTGTCCTCACACGCTCCTCC | 15 | 536 |
| 1338539 | N/A | N/A | 77536 | 77555 | CCTTGCAGAATTCTTGCAGC | 41 | 537 |
| 1338584 | N/A | N/A | 87032 | 87051 | TAGCAAAGCTGATCTAGCCC | 16 | 538 |
| 1338668 | N/A | N/A | 45674 | 45693 | AGACGCATCCATTTCCTCCA | 28 | 539 |
| 1338714 | N/A | N/A | 50484 | 50503 | GGCACTGGCTCCTATCAATC | 21 | 540 |
| 1338732 | N/A | N/A | 30479 | 30498 | GGGCTTTTCCCAGGCAGGCC | 30 | 541 |
| 1338757 | N/A | N/A | 40855 | 40874 | TAATCAGCTCCCAATCCCTC | 59 | 542 |
| 1338790 | N/A | N/A | 92433 | 92452 | CTGTGTCCACACCTGCGGGA | 30 | 543 |
| 1338877 | 4746 | 4765 | 95125 | 95144 | CTTCATGCCTCCAGAATGCA | 28 | 544 |
| 1338944 | N/A | N/A | 51865 | 51884 | TGAAGATTCCTCCCCGCAGC | 59 | 545 |
| 1338988 | N/A | N/A | 49201 | 49220 | ACCAGACCCCAGAATCTCCT | 42 | 546 |
| 1339065 | N/A | N/A | 84233 | 84252 | ACCAGCAGCATCCTTAATAA | 48 | 547 |
| 1339137 | N/A | N/A | 72442 | 72461 | CAGCCCGGCCTTACTTCTTG | 38 | 548 |
| 1339151 | N/A | N/A | 27805 | 27824 | CCCAGGCAAACCGCCCAGCA | 20 | 549 |
| 1339156 | N/A | N/A | 91716 | 91735 | GACCTTTACTCCAGGCCTCA | 13 | 550 |
| 1339160 | N/A | N/A | 90703 | 90722 | ACGAAGGTCACCATCCACCT | 19 | 551 |
| 1339168 | N/A | N/A | 23662 | 23681 | TTGGACACCATCCCGGGCCT | 16 | 552 |
| 1339180 | 4265 | 4284 | 94644 | 94663 | CAGAGTGCAGAACAGCAGCC | 41 | 553 |
| 1339217 | N/A | N/A | 69820 | 69839 | GCCCTGTTCTCTGAAGCAAC | 26 | 554 |
| 1339277 | N/A | N/A | 65182 | 65201 | ATCACTGTCCCAATCACCCC | 58 | 555 |
| 1339289 | 4507 | 4526 | 94886 | 94905 | TCCATGGAAATGCACCATCT | 23 | 556 |
| 1339330 | N/A | N/A | 60779 | 60798 | GGGCCAGTCCCCTTCTCTAC | 21 | 557 |
| 1339365 | N/A | N/A | 36572 | 36591 | CAAGAGAACATCTGTGCCGT | 32 | 558 |
| 1339417 | N/A | N/A | 57078 | 57097 | CAGTAGGGCACCACAGCCAC | 67 | 559 |
| 1339423 | N/A | N/A | 58942 | 58961 | GTGAGGTGCCATCCCGGGCA | 29 | 560 |
| 1339454 | N/A | N/A | 85145 | 85164 | GGCGGTACATCCACGGGCTC | 39 | 561 |
| 1339481 | N/A | N/A | 56447 | 56466 | GGTGCCTTCCTTTGCCGTAA | 13 | 562 |
| 1339523 | N/A | N/A | 20544 | 20563 | CTTCCACCTTACCCAGACCT | 37 | 563 |
| 1339569 | N/A | N/A | 32356 | 32375 | GTGGTCCCCCTCGCCACGCA | 26 | 564 |
| 1339621 | N/A | N/A | 79249 | 79268 | AGACCCCTCACCAAACATCC | 51 | 565 |

TABLE 8
Reduction of KCNT1 RNA by 4,000 nM 5-10-5 MOE gapmers with a mixed backbone measured
with human KCNT1 primer probe set RTS39496

| | SEQ | SEQ | SEQ | SEQ | | | |
|---|---|---|---|---|---|---|---|
| | ID | ID | ID | ID | | | |
| | NO: 1 | NO: 1 | NO: 2 | NO: 2 | | KCNT1 | SEQ |
| Compound | Start | Stop | Start | Stop | | (% | ID |
| Number | Site | Site | Site | Site | Sequence (5′ to 3′) | UTC) | No. |
| 1080855 | 3854 | 3873 | 94233 | 94252 | GTCACGCTAGTGCCACCGTG | 30 | 283 |
| 1337226 | N/A | N/A | 37418 | 37437 | CGGCAGGTCCCTGACAGGCA | 12 | 566 |
| 1337228 | N/A | N/A | 93317 | 93336 | TTCATAGCAACCCATGCCTA | 59 | 567 |
| 1337243 | N/A | N/A | 57076 | 57095 | GTAGGGCACCACAGCCACTA | 56 | 568 |
| 1337267 | N/A | N/A | 56391 | 56410 | GAGACGGGCTTCCTTGCATC | 27 | 569 |
| 1337329 | N/A | N/A | 60574 | 60593 | GCATCTGTATCCCCTCGCCC | 12 | 570 |
| 1337365 | N/A | N/A | 82776 | 82795 | TCCTGTGAACTTCCTCCCCT | 55 | 571 |
| 1337400 | N/A | N/A | 50482 | 50501 | CACTGGCTCCTATCAATCGA | 50 | 572 |
| 1337409 | N/A | N/A | 68260 | 68279 | AGATGGTCCACCCCACATGA | 44 | 573 |
| 1337462 | N/A | N/A | 34887 | 34906 | CCAGGGCTGACCCTTGGACT | 47 | 574 |
| 1337506 | N/A | N/A | 76381 | 76400 | GGACACACAACATACGCAAC | 69 | 575 |
| 1337528 | N/A | N/A | 73718 | 73737 | CCATGGGCCTCCACCTGCTC | 62 | 576 |
| 1337575 | N/A | N/A | 90700 | 90719 | AAGGTCACCATCCACCTGGC | 18 | 577 |
| 1337595 | N/A | N/A | 49164 | 49183 | CAGCACGGCCTCCCCGAGCT | 35 | 578 |
| 1337598 | N/A | N/A | 51825 | 51844 | AGTCTGGGCCCTCCAGGCCG | 55 | 579 |
| 1337622 | N/A | N/A | 19121 | 19140 | ACACACCAACACCACAGGGC | 22 | 580 |
| | | | 19165 | 19184 | | | |
| 1337673 | N/A | N/A | 68884 | 68903 | CCCCTGTTCTATTTTGAGCC | 42 | 581 |
| 1337677 | N/A | N/A | 67941 | 67960 | CCAGACGATCCACCCTAAAT | 51 | 582 |
| 1337684 | N/A | N/A | 22968 | 22987 | CCCACCCTCACCTTTGGGTC | 50 | 583 |
| 1337708 | N/A | N/A | 91714 | 91733 | CCTTTACTCCAGGCCTCAGT | 76 | 584 |
| 1337816 | N/A | N/A | 27208 | 27227 | GAGTACTCTCCACAGACCCC | 35 | 585 |
| 1337925 | N/A | N/A | 29628 | 29647 | TGGTGCCACACCTCCCTTCA | 46 | 586 |
| 1337956 | N/A | N/A | 78566 | 78585 | ACTGGAAACCATCCACAGAT | 56 | 587 |
| 1337975 | N/A | N/A | 54376 | 54395 | TTCTGCCCTCTTCTGACCTA | 23 | 588 |
| 1338018 | N/A | N/A | 93878 | 93897 | CACAGGTGCTACTCACACAA | 53 | 589 |
| 1338027 | 4745 | 4764 | 95124 | 95143 | TTCATGCCTCCAGAATGCAT | 31 | 590 |
| 1338042 | N/A | N/A | 18184 | 18203 | CCGTTTTCAAGAATTAACCA | 19 | 591 |
| 1338060 | N/A | N/A | 43150 | 43169 | GAGGAAGCCACCACCTGTCA | 49 | 592 |
| 1338124 | N/A | N/A | 17646 | 17665 | TGTGTCCTGACCATTTTCAA | 26 | 593 |
| 1338160 | N/A | N/A | 42252 | 42271 | CAAAGGCACCCCCTTATCTC | 66 | 594 |
| 1338161 | N/A | N/A | 22247 | 22266 | GAGAGAAGCCTCTCTCTGTT | 44 | 595 |
| 1338269 | N/A | N/A | 75543 | 75562 | ACTTGGCCCCAAACCTAGGC | 39 | 596 |
| 1338324 | N/A | N/A | 62935 | 62954 | AAGCCACACACAACTGGCTT | 66 | 597 |
| 1338369 | N/A | N/A | 58383 | 58402 | ACTAGGTCACCCACCCAGGA | 52 | 598 |
| 1338422 | N/A | N/A | 55655 | 55674 | TACATCCCACATCTGCGGGA | 23 | 599 |
| 1338464 | N/A | N/A | 87027 | 87046 | AAGCTGATCTAGCCCAGGTC | 28 | 600 |
| 1338477 | N/A | N/A | 66011 | 66030 | CCTTGCCACACAAAACAGTT | 53 | 601 |
| 1338483 | N/A | N/A | 85116 | 85135 | CCGTGGCCAACTCTCGGGTC | 50 | 602 |
| 1338523 | N/A | N/A | 47069 | 47088 | TCCCAGAGTCCACACCCGGC | 38 | 603 |
| 1338533 | N/A | N/A | 53183 | 53202 | TGGCTTTTTCCATCCTGGGA | 8 | 604 |
| 1338553 | N/A | N/A | 71083 | 71102 | GCATCCTGCCCCAGACGCAC | 32 | 605 |
| 1338579 | N/A | N/A | 40139 | 40158 | GCTACAGCTCCCATGCTGCA | 41 | 606 |
| 1338676 | N/A | N/A | 31675 | 31694 | GAACCACCCACAGAGAGGCC | 43 | 607 |
| 1338677 | N/A | N/A | 92432 | 92451 | TGTGTCCACACCTGCGGGAT | 29 | 608 |
| 1338698 | 4503 | 4522 | 94882 | 94901 | TGGAAATGCACCATCTTCCG | 22 | 609 |
| 1338706 | N/A | N/A | 39169 | 39188 | GGCTTCGGCCTCACTCACCT | 32 | 610 |
| 1338721 | N/A | N/A | 58927 | 58946 | GGGCAGGCACTCACTTTGTA | 67 | 611 |
| 1338726 | N/A | N/A | 23651 | 23670 | CCCGGGCCTTTCCTGCTCCA | 31 | 612 |
| 1338753 | N/A | N/A | 21375 | 21394 | GAAGCCGCACCTCCACTGCC | 46 | 613 |
| 1338771 | N/A | N/A | 32673 | 32692 | TTTAAGCACACCATCCCGGA | 65 | 614 |
| 1338793 | N/A | N/A | 48754 | 48773 | CACACTCCACTCCAAGGCAA | 74 | 615 |
| 1338825 | N/A | N/A | 27739 | 27758 | GCTGAGGGTCCCAAACCCAG | 35 | 616 |
| 1338845 | N/A | N/A | 72437 | 72456 | CGGCCTTACTTCTTGTGGGC | 50 | 617 |
| 1338852 | N/A | N/A | 45673 | 45692 | GACGCATCCATTTCCTCCAC | 31 | 618 |
| 1338905 | N/A | N/A | 36489 | 36508 | AGGATCTTCGCAACTTGCTG | 38 | 619 |
| 1338915 | N/A | N/A | 79245 | 79264 | CCCTCACCAAACATCCCCCG | 84 | 620 |
| 1338943 | N/A | N/A | 32279 | 32298 | ATTTGGCCCACCACACACGG | 66 | 621 |
| 1338969 | N/A | N/A | 87774 | 87793 | AGCCCTGATCCCTCTTGCAA | 19 | 622 |
| 1338983 | 4264 | 4283 | 94643 | 94662 | AGAGTGCAGAACAGCAGCCC | 24 | 623 |
| 1339093 | N/A | N/A | 65181 | 65200 | TCACTGTCCCAATCACCCCC | 69 | 624 |
| 1339109 | N/A | N/A | 40854 | 40873 | AATCAGCTCCCAATCCCTCC | 82 | 625 |
| 1339133 | N/A | N/A | 33704 | 33723 | TGACGGTCCCATGCTGATCA | 37 | 626 |
| 1339167 | N/A | N/A | 48034 | 48053 | GCGATCTGTCTTCACGAGTC | 33 | 627 |
| 1339170 | N/A | N/A | 25732 | 25751 | CTGGCAGAATCATCAGTAAC | 74 | 628 |
| 1339194 | N/A | N/A | 31117 | 31136 | GCGAACTTAATTATATCTCC | 16 | 629 |
| 1339212 | N/A | N/A | 89345 | 89364 | CCCATGGCTTCATCAACGGA | 46 | 630 |
| 1339228 | N/A | N/A | 81929 | 81948 | GCAGTGGTTATACTGAACCT | 42 | 631 |
| 1339262 | N/A | N/A | 44846 | 44865 | CTAAGAGCCCTTGTCTGCCA | 63 | 632 |
| 1339388 | N/A | N/A | 20528 | 20547 | ACCTGAGACACCCCCATGGC | 70 | 633 |
| 1339451 | N/A | N/A | 30453 | 30472 | GGCTGTTACATCCGCAGTGA | 16 | 634 |
| 1339467 | N/A | N/A | 69811 | 69830 | TCTGAAGCAACCCCCCAGCT | 63 | 635 |
| 1339471 | N/A | N/A | 19854 | 19873 | GAAGCAAGCCCCTTTGGGCA | 30 | 636 |
| 1339491 | N/A | N/A | 62059 | 62078 | ACGGGACTCCATCATTACCC | 15 | 637 |
| 1339558 | N/A | N/A | 18574 | 18593 | GGAGTGAGTCCCAGTGGTTA | 56 | 638 |
| 1339564 | N/A | N/A | 86207 | 86226 | AGGGAGTCCTATCATTCAGA | 33 | 639 |
| 1339578 | N/A | N/A | 77410 | 77429 | GCCGCCAGCCTTACCTTGTC | 80 | 640 |
| 1339626 | N/A | N/A | 24534 | 24553 | AAACACACTTACACCCATTC | 33 | 641 |
| 1339630 | N/A | N/A | 84232 | 84251 | CCAGCAGCATCCTTAATAAT | 61 | 642 |

TABLE 9
Reduction of KCNT1 RNA by 4,000 nM 5-10-5 MOE gapmers with a mixed backbone measured
with human KCNT1 primer probe set RTS39496

| | SEQ | SEQ | SEQ | SEQ | | | |
|---|---|---|---|---|---|---|---|
| | ID | ID | ID | ID | | | |
| | NO: 1 | NO: 1 | NO: 2 | NO: 2 | | KCNT1 | SEQ |
| Compound | Start | Stop | Start | Stop | | (% | ID |
| Number | Site | Site | Site | Site | Sequence (5′ to 3′) | UTC) | No. |
| 1080855 | 3854 | 3873 | 94233 | 94252 | GTCACGCTAGTGCCACCGTG | 21 | 283 |
| 1337246 | N/A | N/A | 65180 | 65199 | CACTGTCCCAATCACCCCCA | 51 | 643 |
| 1337258 | N/A | N/A | 19136 | 19155 | TCCCTCCTGTCCTATACACA | 56 | 644 |
| 1337259 | 623 | 642 | 58881 | 58900 | CCAGGAAGCTTATTATGGCC | 19 | 645 |
| 1337266 | N/A | N/A | 55630 | 55649 | GGTAGCCCCAACCCAACAGC | 17 | 646 |
| 1337417 | N/A | N/A | 92410 | 92429 | GACGGCCTGACACCTGCCCC | 25 | 647 |
| 1337494 | N/A | N/A | 30386 | 30405 | CCGCTGGCTCTTTTCTGCCC | 34 | 648 |
| 1337654 | N/A | N/A | 81925 | 81944 | TGGTTATACTGAACCTGTTT | 28 | 649 |
| 1337688 | 4500 | 4519 | 94879 | 94898 | AAATGCACCATCTTCCGCCC | 33 | 650 |
| 1337702 | 4744 | 4763 | 95123 | 95142 | TCATGCCTCCAGAATGCATC | 20 | 651 |
| 1337728 | N/A | N/A | 54372 | 54391 | GCCCTCTTCTGACCTAGACA | 23 | 652 |
| 1337760 | N/A | N/A | 67938 | 67957 | GACGATCCACCCTAAATGGT | 33 | 653 |
| 1337775 | N/A | N/A | 27199 | 27218 | CCACAGACCCCTCCTTCTGA | 44 | 654 |
| 1337794 | N/A | N/A | 53182 | 53201 | GGCTTTTTCCATCCTGGGAC | 14 | 655 |
| 1337801 | N/A | N/A | 68883 | 68902 | CCCTGTTCTATTTTGAGCCT | 52 | 656 |
| 1337808 | N/A | N/A | 69810 | 69829 | CTGAAGCAACCCCCCAGCTT | 65 | 657 |
| 1337819 | N/A | N/A | 22967 | 22986 | CCACCCTCACCTTTGGGTCA | 54 | 658 |
| 1337833 | N/A | N/A | 46983 | 47002 | GGCGCAGCCACACACTCGCC | 47 | 659 |
| 1338021 | N/A | N/A | 29627 | 29646 | GGTGCCACACCTCCCTTCAA | 44 | 660 |
| 1338053 | N/A | N/A | 86206 | 86225 | GGGAGTCCTATCATTCAGAA | 38 | 661 |
| 1338129 | N/A | N/A | 24533 | 24552 | AACACACTTACACCCATTCC | 28 | 662 |
| 1338163 | N/A | N/A | 83786 | 83805 | TGGCAGAGCATCTCACTGAC | 58 | 663 |
| 1338193 | N/A | N/A | 49144 | 49163 | CTGTTGTTCTCCCCTCCGCT | 42 | 664 |
| 1338266 | N/A | N/A | 40138 | 40157 | CTACAGCTCCCATGCTGCAC | 51 | 665 |
| 1338292 | N/A | N/A | 78190 | 78209 | GTGGTTTGCTTTCCTGATCT | 24 | 666 |
| 1338314 | N/A | N/A | 58348 | 58367 | GGCCTGTGCACTCTCCACCC | 48 | 667 |
| 1338316 | N/A | N/A | 40739 | 40758 | TGCAGCACCCATAAGTGGGC | 54 | 668 |
| 1338339 | N/A | N/A | 21372 | 21391 | GCCGCACCTCCACTGCCACA | 44 | 669 |
| 1338487 | N/A | N/A | 90682 | 90701 | GCCTGGGCAGCCATAAAGCC | 39 | 670 |
| 1338514 | N/A | N/A | 85115 | 85134 | CGTGGCCAACTCTCGGGTCA | 76 | 671 |
| 1338561 | N/A | N/A | 45672 | 45691 | ACGCATCCATTTCCTCCACA | 49 | 672 |
| 1338607 | N/A | N/A | 79244 | 79263 | CCTCACCAAACATCCCCCGT | 72 | 673 |
| 1338672 | N/A | N/A | 48753 | 48772 | ACACTCCACTCCAAGGCAAC | 66 | 674 |
| 1338679 | N/A | N/A | 32658 | 32677 | CCGGAGGTCCGAAATCCCAA | 22 | 675 |
| 1338699 | N/A | N/A | 77409 | 77428 | CCGCCAGCCTTACCTTGTCC | 95 | 676 |
| 1338709 | N/A | N/A | 18069 | 18088 | GAGAGCCTCCCAGCCACGCA | 37 | 677 |
| 1338764 | N/A | N/A | 60573 | 60592 | CATCTGTATCCCCTCGCCCG | 25 | 678 |
| 1338775 | N/A | N/A | 89299 | 89318 | GATGAGCTTCTCTCCACGCC | 36 | 679 |
| 1338803 | N/A | N/A | 34864 | 34883 | GTGAGACCTCTTGATTGCCC | 53 | 680 |
| 1338822 | N/A | N/A | 91688 | 91707 | TCTGCTCGCCCCCCAACCCG | 58 | 681 |
| 1338867 | N/A | N/A | 44823 | 44842 | AGACAGTTCCTCCCTTGCAA | 47 | 682 |
| 1338903 | N/A | N/A | 82775 | 82794 | CCTGTGAACTTCCTCCCCTT | 47 | 683 |
| 1338942 | N/A | N/A | 56380 | 56399 | CCTTGCATCTCTCACTGGGC | 26 | 684 |
| 1338964 | N/A | N/A | 50481 | 50500 | ACTGGCTCCTATCAATCGAA | 25 | 685 |
| 1338992 | N/A | N/A | 31674 | 31693 | AACCACCCACAGAGAGGCCA | 45 | 686 |
| 1339024 | N/A | N/A | 71081 | 71100 | ATCCTGCCCCAGACGCACCG | 28 | 687 |
| 1339033 | N/A | N/A | 23650 | 23669 | CCGGGCCTTTCCTGCTCCAA | 38 | 688 |
| 1339046 | N/A | N/A | 68257 | 68276 | TGGTCCACCCCACATGATCT | 28 | 689 |
| 1339115 | N/A | N/A | 93316 | 93335 | TCATAGCAACCCATGCCTAT | 53 | 690 |
| 1339128 | N/A | N/A | 33699 | 33718 | GTCCCATGCTGATCAAGTTC | 19 | 691 |
| 1339131 | N/A | N/A | 25730 | 25749 | GGCAGAATCATCAGTAACAA | 36 | 692 |
| 1339173 | N/A | N/A | 62926 | 62945 | ACAACTGGCTTCTTCTAGAA | 43 | 693 |
| 1339177 | N/A | N/A | 76187 | 76206 | ACACAATACCACTCAGACAC | 100 | 694 |
| 1339222 | N/A | N/A | 93877 | 93896 | ACAGGTGCTACTCACACAAT | 48 | 695 |
| 1339249 | N/A | N/A | 75542 | 75561 | CTTGGCCCCAAACCTAGGCC | 81 | 696 |
| 1339298 | N/A | N/A | 20527 | 20546 | CCTGAGACACCCCCATGGCC | 46 | 697 |
| 1339323 | N/A | N/A | 86927 | 86946 | TGTGGGTCACACAGGACAGG | 26 | 698 |
| | | | 86984 | 87003 | | | |
| 1339355 | N/A | N/A | 31116 | 31135 | CGAACTTAATTATATCTCCC | 26 | 699 |
| 1339358 | N/A | N/A | 73621 | 73640 | GCCACTGCGACCTCATTCCG | 49 | 700 |
| 1339372 | N/A | N/A | 18554 | 18573 | AGGAGATTCCTTCTAGGGTA | 17 | 701 |
| 1339396 | N/A | N/A | 22119 | 22138 | CTTCTGCACCCATTCCTGCT | 47 | 702 |
| 1339426 | 1719 | 1738 | 72323 | 72342 | CGCCCATACATGCGCTGCCA | 28 | 703 |
| 1339465 | N/A | N/A | 57072 | 57091 | GGCACCACAGCCACTAGTGT | 56 | 704 |
| 1339469 | N/A | N/A | 42250 | 42269 | AAGGCACCCCCTTATCTCGG | 52 | 705 |
| 1339470 | N/A | N/A | 17644 | 17663 | TGTCCTGACCATTTTCAACC | 25 | 706 |
| 1339478 | N/A | N/A | 51692 | 51711 | TCAGGACACCGCAAGTGCTC | 44 | 707 |
| 1339479 | N/A | N/A | 62058 | 62077 | CGGGACTCCATCATTACCCA | 14 | 708 |
| 1339530 | N/A | N/A | 65998 | 66017 | AACAGTTTCCACAGCTGGGA | 35 | 709 |
| 1339571 | N/A | N/A | 39124 | 39143 | CCTGTCTCCCCCAAAGTGGC | 55 | 710 |
| 1339574 | N/A | N/A | 27738 | 27757 | CTGAGGGTCCCAAACCCAGC | 41 | 711 |
| 1339595 | N/A | N/A | 43135 | 43154 | TGTCAGATGTCCCACAGCCT | 57 | 712 |
| 1339606 | N/A | N/A | 32277 | 32296 | TTGGCCCACCACACACGGCA | 44 | 713 |
| 1339617 | N/A | N/A | 36426 | 36445 | ATGTTTGTCACAGAAAGTCC | 39 | 714 |
| 1339619 | N/A | N/A | 48033 | 48052 | CGATCTGTCTTCACGAGTCA | 29 | 715 |
| 1339628 | N/A | N/A | 87773 | 87792 | GCCCTGATCCCTCTTGCAAA | 31 | 716 |
| 1339635 | 4263 | 4282 | 94642 | 94661 | GAGTGCAGAACAGCAGCCCT | 34 | 717 |
| 1339642 | N/A | N/A | 19853 | 19872 | AAGCAAGCCCCTTTGGGCAA | 72 | 718 |
| 1339647 | N/A | N/A | 37384 | 37403 | TTCTTCAGCACCCATGCTGA | 60 | 719 |

TABLE 10
Reduction of KCNT1 RNA by 4,000 nM 5-10-5 MOE gapmers with a mixed backbone measured
with human KCNT1 primer probe set RTS39496

| | SEQ | SEQ | SEQ | SEQ | | | |
|---|---|---|---|---|---|---|---|
| | ID | ID | ID | ID | | | |
| | NO: 1 | NO: 1 | NO: 2 | NO: 2 | | KCNT1 | SEQ |
| Compound | Start | Stop | Start | Stop | | (% | ID |
| Number | Site | Site | Site | Site | Sequence (5′ to 3′) | UTC) | No. |
| 1080855 | 3854 | 3873 | 94233 | 94252 | GTCACGCTAGTGCCACCGTG | 24 | 283 |
| 1337233 | N/A | N/A | 83763 | 83782 | CGTGTATGCCATCTCCACCT | 37 | 720 |
| 1337268 | N/A | N/A | 31114 | 31133 | AACTTAATTATATCTCCCGT | 39 | 721 |
| 1337297 | N/A | N/A | 30385 | 30404 | CGCTGGCTCTTTTCTGCCCC | 47 | 722 |
| 1337301 | N/A | N/A | 65976 | 65995 | TGCTCAAGACTCCAGGGCGA | 36 | 723 |
| 1337316 | N/A | N/A | 36385 | 36404 | GAAGGACAATACCTTCGGCA | 47 | 724 |
| 1337392 | N/A | N/A | 29508 | 29527 | CCTTGACTAATCACTGTGGA | 46 | 725 |
| 1337420 | N/A | N/A | 43061 | 43080 | GTAGAGGATCCACCCAGGGA | 63 | 726 |
| 1337483 | 622 | 641 | 58880 | 58899 | CAGGAAGCTTATTATGGCCA | 18 | 727 |
| 1337510 | N/A | N/A | 48748 | 48767 | CCACTCCAAGGCAACACCCA | 47 | 728 |
| 1337516 | N/A | N/A | 77309 | 77328 | AGGGTAGCCCTTCACATACC | 31 | 729 |
| 1337632 | N/A | N/A | 34717 | 34736 | GCAGACAAAGAACCCGGCCA | 48 | 730 |
| 1337665 | N/A | N/A | 73620 | 73639 | CCACTGCGACCTCATTCCGC | 47 | 731 |
| 1337681 | N/A | N/A | 27059 | 27078 | GTCATGTGTCCACCACACGC | 30 | 732 |
| 1337694 | N/A | N/A | 78189 | 78208 | TGGTTTGCTTTCCTGATCTC | 38 | 733 |
| 1337698 | N/A | N/A | 22118 | 22137 | TTCTGCACCCATTCCTGCTC | 90 | 734 |
| 1337704 | N/A | N/A | 93874 | 93893 | GGTGCTACTCACACAATGTC | 39 | 735 |
| 1337709 | N/A | N/A | 44808 | 44827 | TGCAAAGCACTTACTGAGAC | 62 | 736 |
| 1337758 | N/A | N/A | 45595 | 45614 | GGGCACGGCTTCTATCTCAC | 44 | 737 |
| 1337779 | N/A | N/A | 58199 | 58218 | GTCCTCAGCACTCACTGAAC | 32 | 738 |
| 1337803 | N/A | N/A | 53181 | 53200 | GCTTTTTCCATCCTGGGACA | 18 | 739 |
| 1337916 | N/A | N/A | 87772 | 87791 | CCCTGATCCCTCTTGCAAAC | 29 | 740 |
| 1337946 | N/A | N/A | 50480 | 50499 | CTGGCTCCTATCAATCGAAT | 37 | 741 |
| 1338050 | N/A | N/A | 51681 | 51700 | CAAGTGCTCAGAACATGCCG | 39 | 742 |
| 1338056 | N/A | N/A | 69806 | 69825 | AGCAACCCCCCAGCTTGTCC | 40 | 743 |
| 1338059 | N/A | N/A | 23641 | 23660 | TCCTGCTCCAATAAACCAGA | 54 | 744 |
| 1338079 | N/A | N/A | 57070 | 57089 | CACCACAGCCACTAGTGTCC | 65 | 745 |
| 1338089 | N/A | N/A | 62057 | 62076 | GGGACTCCATCATTACCCAC | 31 | 746 |
| 1338132 | N/A | N/A | 75541 | 75560 | TTGGCCCCAAACCTAGGCCA | 84 | 747 |
| 1338165 | N/A | N/A | 47908 | 47927 | GGCCCAAGCCTCCTTGCTGC | 81 | 748 |
| 1338185 | N/A | N/A | 71075 | 71094 | CCCCAGACGCACCGTCACCC | 15 | 749 |
| | | | 71155 | 71174 | | | |
| 1338192 | N/A | N/A | 25701 | 25720 | GACACGGCACTTCCCGGGAC | 36 | 750 |
| 1338206 | N/A | N/A | 90676 | 90695 | GCAGCCATAAAGCCTGCCTA | 38 | 751 |
| 1338229 | N/A | N/A | 65034 | 65053 | GCTTGTCCCACTCAGGGCCT | 16 | 752 |
| 1338243 | N/A | N/A | 20525 | 20544 | TGAGACACCCCCATGGCCAA | 61 | 753 |
| 1338291 | 4743 | 4762 | 95122 | 95141 | CATGCCTCCAGAATGCATCC | 31 | 754 |
| 1338334 | N/A | N/A | 18410 | 18429 | TCATTGTGAAATCCCATGCC | 51 | 755 |
| 1338374 | N/A | N/A | 46982 | 47001 | GCGCAGCCACACACTCGCCA | 49 | 756 |
| 1338401 | N/A | N/A | 32255 | 32274 | TCCACGGAACTCCATGGGTC | 32 | 757 |
| 1338424 | N/A | N/A | 81840 | 81859 | GTACTAAGAGCTACTGGCCA | 52 | 758 |
| 1338559 | 4499 | 4518 | 94878 | 94897 | AATGCACCATCTTCCGCCCA | 43 | 759 |
| 1338566 | N/A | N/A | 37300 | 37319 | GCTGAGCCGCCATCATGCTC | 38 | 760 |
| 1338573 | N/A | N/A | 91687 | 91706 | CTGCTCGCCCCCCAACCCGC | 50 | 761 |
| 1338577 | N/A | N/A | 92409 | 92428 | ACGGCCTGACACCTGCCCCT | 29 | 762 |
| 1338582 | N/A | N/A | 24532 | 24551 | ACACACTTACACCCATTCCA | 39 | 763 |
| 1338589 | N/A | N/A | 85104 | 85123 | CTCGGGTCATTCTTCAGCGG | 64 | 764 |
| 1338615 | N/A | N/A | 54305 | 54324 | ATGCCAGGCCCCCTTGTGAC | 32 | 765 |
| 1338643 | N/A | N/A | 18006 | 18025 | AGGGAGATAAACTAAACTCT | 69 | 766 |
| 1338651 | N/A | N/A | 40738 | 40757 | GCAGCACCCATAAGTGGGCA | 60 | 767 |
| 1338658 | N/A | N/A | 62925 | 62944 | CAACTGGCTTCTTCTAGAAC | 68 | 768 |
| 1338762 | N/A | N/A | 22942 | 22961 | GGCCACACCCTTCCTCCTGA | 74 | 769 |
| 1338855 | N/A | N/A | 33690 | 33709 | TGATCAAGTTCTAATGGGAA | 57 | 770 |
| 1338864 | N/A | N/A | 72184 | 72203 | TGGCATGGATCCCCTCCCTA | 36 | 771 |
| 1338911 | N/A | N/A | 93301 | 93320 | CCTATGGTATCCACAGACCC | 27 | 772 |
| 1338948 | N/A | N/A | 17643 | 17662 | GTCCTGACCATTTTCAACCT | 34 | 773 |
| 1338950 | N/A | N/A | 55629 | 55648 | GTAGCCCCAACCCAACAGCA | 32 | 774 |
| 1339010 | N/A | N/A | 42248 | 42267 | GGCACCCCCTTATCTCGGGC | 38 | 775 |
| 1339028 | N/A | N/A | 19821 | 19840 | GAAGAGAAACCCTTCAGGCC | 36 | 776 |
| 1339045 | N/A | N/A | 27736 | 27755 | GAGGGTCCCAAACCCAGCAA | 41 | 777 |
| 1339055 | N/A | N/A | 86959 | 86978 | CCACAGTCCCAGCCCCCGGA | 24 | 778 |
| 1339107 | N/A | N/A | 89298 | 89317 | ATGAGCTTCTCTCCACGCCA | 47 | 779 |
| 1339108 | N/A | N/A | 76135 | 76154 | CCAGACACACATCACATATC | 96 | 780 |
| 1339162 | N/A | N/A | 19092 | 19111 | TCCCTCCCGTCCTATAGACA | 59 | 781 |
| 1339182 | N/A | N/A | 21370 | 21389 | CGCACCTCCACTGCCACAGA | 39 | 782 |
| 1339250 | N/A | N/A | 39106 | 39125 | GCGCTGGCACCAACAAGATC | 54 | 783 |
| 1339266 | N/A | N/A | 82774 | 82793 | CTGTGAACTTCCTCCCCTTC | 59 | 784 |
| 1339292 | N/A | N/A | 31638 | 31657 | GGTGGAAACTTCTGCAGGAC | 49 | 785 |
| 1339305 | N/A | N/A | 60572 | 60591 | ATCTGTATCCCCTCGCCCGG | 55 | 786 |
| 1339320 | N/A | N/A | 40137 | 40156 | TACAGCTCCCATGCTGCACT | 53 | 787 |
| 1339378 | 4062 | 4081 | 94441 | 94460 | CGTTGCCCTCCCAGCCAGCC | 35 | 788 |
| 1339420 | N/A | N/A | 79242 | 79261 | TCACCAAACATCCCCCGTGA | 75 | 789 |
| 1339453 | N/A | N/A | 68874 | 68893 | ATTTTGAGCCTCCCTAGAAC | 87 | 790 |
| 1339476 | N/A | N/A | 67937 | 67956 | ACGATCCACCCTAAATGGTC | 47 | 791 |
| 1339525 | N/A | N/A | 56379 | 56398 | CTTGCATCTCTCACTGGGCT | 21 | 792 |
| 1339538 | N/A | N/A | 49143 | 49162 | TGTTGTTCTCCCCTCCGCTC | 44 | 793 |
| 1339567 | N/A | N/A | 32655 | 32674 | GAGGTCCGAAATCCCAAGCC | 39 | 794 |
| 1339573 | N/A | N/A | 68256 | 68275 | GGTCCACCCCACATGATCTA | 23 | 795 |
| 1339593 | N/A | N/A | 86205 | 86224 | GGAGTCCTATCATTCAGAAC | 61 | 796 |

TABLE 11
Reduction of KCNT1 RNA by 4,000 nM 5-10-5 MOE gapmers with a mixed backbone measured
with human KCNT1 primer probe set RTS39496

| | SEQ | SEQ | SEQ | SEQ | | | |
|---|---|---|---|---|---|---|---|
| | ID | ID | ID | ID | | | |
| | NO: 1 | NO: 1 | NO: 2 | NO: 2 | | KCNT1 | SEQ |
| Compound | Start | Stop | Start | Stop | | (% | ID |
| Number | Site | Site | Site | Site | Sequence (5′ to 3′) | UTC) | No. |
| 1080855 | 3854 | 3873 | 94233 | 94252 | GTCACGCTAGTGCCACCGTG | 19 | 283 |
| 1080862 | 4032 | 4051 | 94411 | 94430 | GTTGCGGTACATCTGTGTAA | 14 | 362 |
| 1080878 | 4496 | 4515 | 94875 | 94894 | GCACCATCTTCCGCCCAATG | 13 | 209 |
| 1337245 | N/A | N/A | 30373 | 30392 | TCTGCCCCACATAGAAACCA | 31 | 797 |
| 1337250 | N/A | N/A | 86199 | 86218 | CTATCATTCAGAACAGGGAC | 32 | 798 |
| 1337269 | N/A | N/A | 44807 | 44826 | GCAAAGCACTTACTGAGACA | 46 | 799 |
| 1337276 | N/A | N/A | 45593 | 45612 | GCACGGCTTCTATCTCACAC | 27 | 800 |
| 1337279 | N/A | N/A | 62055 | 62074 | GACTCCATCATTACCCACCA | 14 | 801 |
| 1337388 | N/A | N/A | 72183 | 72202 | GGCATGGATCCCCTCCCTAT | 26 | 802 |
| 1337425 | N/A | N/A | 79229 | 79248 | CCCGTGAACACCCAGCCGTT | 54 | 803 |
| 1337434 | N/A | N/A | 23640 | 23659 | CCTGCTCCAATAAACCAGAC | 27 | 804 |
| 1337472 | N/A | N/A | 62924 | 62943 | AACTGGCTTCTTCTAGAACA | 30 | 805 |
| 1337487 | N/A | N/A | 86884 | 86903 | GGCTGCCCCAGAACCTCCGA | 22 | 806 |
| 1337488 | N/A | N/A | 56330 | 56349 | GGCTGGGAACTCACAATTCT | 13 | 807 |
| 1337493 | N/A | N/A | 18409 | 18428 | CATTGTGAAATCCCATGCCA | 54 | 808 |
| 1337513 | N/A | N/A | 28635 | 28654 | ACAGAATTAATTAGCTAATC | 109 | 809 |
| 1337522 | N/A | N/A | 89294 | 89313 | GCTTCTCTCCACGCCAGGCA | 31 | 810 |
| 1337534 | N/A | N/A | 57058 | 57077 | TAGTGTCCCCCAGCCACCCT | 49 | 811 |
| 1337578 | N/A | N/A | 65912 | 65931 | CTGTCAGACACCCCAGGGCT | 22 | 812 |
| 1337583 | N/A | N/A | 85103 | 85122 | TCGGGTCATTCTTCAGCGGA | 40 | 813 |
| 1337584 | N/A | N/A | 40682 | 40701 | AGCAAGTGCCCTCCCCCGAC | 52 | 814 |
| 1337603 | N/A | N/A | 64957 | 64976 | GAGGGACCCCACTGTGGACA | 16 | 815 |
| 1337644 | 621 | 640 | 58879 | 58898 | AGGAAGCTTATTATGGCCAC | 25 | 816 |
| 1337667 | N/A | N/A | 43059 | 43078 | AGAGGATCCACCCAGGGACT | 40 | 817 |
| 1337686 | N/A | N/A | 87767 | 87786 | ATCCCTCTTGCAAACACACC | 16 | 818 |
| 1337732 | N/A | N/A | 78185 | 78204 | TTGCTTTCCTGATCTCAACA | 35 | 819 |
| 1337740 | N/A | N/A | 33664 | 33683 | AGGTCTAGGACTATTATACC | 27 | 820 |
| 1337752 | N/A | N/A | 76083 | 76102 | TTGACACACAACACACATTA | 78 | 821 |
| 1337770 | N/A | N/A | 77308 | 77327 | GGGTAGCCCTTCACATACCT | 18 | 822 |
| 1337798 | N/A | N/A | 49142 | 49161 | GTTGTTCTCCCCTCCGCTCC | 70 | 823 |
| 1337815 | N/A | N/A | 91677 | 91696 | CCCAACCCGCTTCCTAACCC | 72 | 824 |
| 1337837 | N/A | N/A | 17574 | 17593 | CGGATTTGCTAGCTGAGCCC | 13 | 825 |
| 1337967 | N/A | N/A | 22926 | 22945 | CTGACTGTCCCCCTCTGTTT | 61 | 826 |
| 1337991 | N/A | N/A | 38852 | 38871 | ACGCAGGTGCAGCCCAGCCA | 39 | 827 |
| 1338041 | N/A | N/A | 75528 | 75547 | TAGGCCAGGACAACAACTCA | 49 | 828 |
| 1338066 | N/A | N/A | 50453 | 50472 | TTTGATGTCACTGCCTGGCC | 59 | 829 |
| 1338072 | N/A | N/A | 55618 | 55637 | CCAACAGCAACACACTGGTT | 29 | 830 |
| 1338118 | N/A | N/A | 32654 | 32673 | AGGTCCGAAATCCCAAGCCT | 26 | 831 |
| 1338212 | N/A | N/A | 31556 | 31575 | CAGCAGCACCCACTTATCAC | 39 | 832 |
| 1338222 | 4739 | 4758 | 95118 | 95137 | CCTCCAGAATGCATCCATTT | 18 | 833 |
| 1338237 | N/A | N/A | 47905 | 47924 | CCAAGCCTCCTTGCTGCGGC | 15 | 834 |
| 1338256 | N/A | N/A | 27058 | 27077 | TCATGTGTCCACCACACGCC | 33 | 835 |
| 1338268 | N/A | N/A | 67936 | 67955 | CGATCCACCCTAAATGGTCC | 28 | 836 |
| 1338313 | N/A | N/A | 58147 | 58166 | CTTCAGCATTCACTGAGCCT | 7 | 837 |
| 1338375 | N/A | N/A | 60571 | 60590 | TCTGTATCCCCTCGCCCGGC | 22 | 838 |
| 1338459 | N/A | N/A | 18005 | 18024 | GGGAGATAAACTAAACTCTT | 44 | 839 |
| 1338525 | N/A | N/A | 42216 | 42235 | CCCCAGGCTAACATGCTGAA | 53 | 840 |
| 1338560 | N/A | N/A | 21309 | 21328 | CCGTCAGGACCCAAGCCCTC | 48 | 841 |
| 1338619 | N/A | N/A | 48744 | 48763 | TCCAAGGCAACACCCAGCCA | 63 | 842 |
| 1338700 | N/A | N/A | 31113 | 31132 | ACTTAATTATATCTCCCGTG | 25 | 843 |
| 1338766 | N/A | N/A | 19692 | 19711 | TAGGGCACCCTCTCTTACAT | 70 | 844 |
| 1338797 | N/A | N/A | 73619 | 73638 | CACTGCGACCTCATTCCGCC | 51 | 845 |
| 1338819 | N/A | N/A | 92408 | 92427 | CGGCCTGACACCTGCCCCTC | 19 | 846 |
| 1338833 | N/A | N/A | 8841 | 8860 | TGCTCAGAAAATGACCAACT | 36 | 847 |
| | | | 37285 | 37304 | | | |
| 1338907 | N/A | N/A | 93873 | 93892 | GTGCTACTCACACAATGTCA | 54 | 848 |
| 1338917 | N/A | N/A | 82773 | 82792 | TGTGAACTTCCTCCCCTTCC | 62 | 849 |
| 1339030 | N/A | N/A | 54205 | 54224 | CAGGCCTTCTCTCCAGGGAA | 10 | 850 |
| 1339044 | N/A | N/A | 27697 | 27716 | TGGGAACCTCCTTAGTGGCC | 49 | 851 |
| 1339048 | N/A | N/A | 36362 | 36381 | AGCAGCAGTCCCAGAAGCCC | 17 | 852 |
| 1339070 | N/A | N/A | 51582 | 51601 | GCTATGGGCCACTGCAGCCT | 33 | 853 |
| 1339082 | N/A | N/A | 71041 | 71060 | GTCCTGCCCCAGACGCACCG | 21 | 854 |
| 1339118 | N/A | N/A | 24530 | 24549 | ACACTTACACCCATTCCATT | 37 | 855 |
| 1339121 | N/A | N/A | 69795 | 69814 | AGCTTGTCCCTAAGTTGGCC | 20 | 856 |
| 1339163 | N/A | N/A | 25671 | 25690 | GCTCCGGACACCCACCAGGA | 27 | 857 |
| 1339283 | N/A | N/A | 90645 | 90664 | TTGGAGTCCCCACCCCTGCA | 36 | 858 |
| 1339300 | N/A | N/A | 46981 | 47000 | CGCAGCCACACACTCGCCAC | 50 | 859 |
| 1339331 | N/A | N/A | 81829 | 81848 | TACTGGCCAACCTATGTGGA | 37 | 860 |
| 1339332 | N/A | N/A | 32254 | 32273 | CCACGGAACTCCATGGGTCC | 31 | 861 |
| 1339336 | N/A | N/A | 68853 | 68872 | TGACAAAGATTTCCCTAGAC | 59 | 862 |
| 1339342 | N/A | N/A | 20449 | 20468 | CACACCAGCCCTTCCGTCCA | 47 | 863 |
| 1339356 | N/A | N/A | 53032 | 53051 | CGTGGCCCACCATCCGATGC | 46 | 864 |
| 1339427 | N/A | N/A | 83762 | 83781 | GTGTATGCCATCTCCACCTC | 32 | 865 |
| 1339477 | N/A | N/A | 22117 | 22136 | TCTGCACCCATTCCTGCTCC | 44 | 866 |
| 1339480 | N/A | N/A | 34648 | 34667 | GGCACTGTGTCAACTTGATA | 20 | 867 |
| 1339582 | N/A | N/A | 40095 | 40114 | CTGGGCAGAACCTGCTATCC | 46 | 868 |
| 1339585 | N/A | N/A | 93286 | 93305 | GACCCCTGCACACTCACTCA | 37 | 869 |
| 1339586 | N/A | N/A | 68252 | 68271 | CACCCCACATGATCTACACT | 70 | 870 |
| 1339648 | N/A | N/A | 19051 | 19070 | CCCCTCCTGTCCTATAGACA | 53 | 871 |

TABLE 12
Reduction of KCNT1 RNA by 4,000 nM 5-10-5 MOE gapmers with a mixed backbone measured
with human KCNT1 primer probe set RTS39496

| | SEQ | SEQ | SEQ | SEQ | | | |
|---|---|---|---|---|---|---|---|
| | ID | ID | ID | ID | | | |
| | NO: 1 | NO: 1 | NO: 2 | NO: 2 | | KCNT1 | SEQ |
| Compound | Start | Stop | Start | Stop | | (% | ID |
| Number | Site | Site | Site | Site | Sequence (5′ to 3′) | UTC) | No. |
| 1080855 | 3854 | 3873 | 94233 | 94252 | GTCACGCTAGTGCCACCGTG | 14 | 283 |
| 1337217 | N/A | N/A | 31554 | 31573 | GCAGCACCCACTTATCACTT | 34 | 872 |
| 1337220 | N/A | N/A | 93871 | 93890 | GCTACTCACACAATGTCACT | 49 | 873 |
| 1337264 | N/A | N/A | 46951 | 46970 | GCCCGTCTCACCTCTGCCAG | 43 | 874 |
| 1337298 | N/A | N/A | 78154 | 78173 | GAGAAGCTGCTAACTCCAGA | 43 | 875 |
| 1337304 | N/A | N/A | 60560 | 60579 | TCGCCCGGCCCTGCTTGCCT | 14 | 876 |
| 1337383 | N/A | N/A | 77305 | 77324 | TAGCCCTTCACATACCTGGG | 53 | 877 |
| 1337393 | N/A | N/A | 18979 | 18998 | GGGCCAGGTCCACTCCCATC | 16 | 878 |
| 1337439 | N/A | N/A | 38781 | 38800 | CGCGCGCCCCTACCTCTGGC | 38 | 879 |
| 1337463 | N/A | N/A | 33662 | 33681 | GTCTAGGACTATTATACCCA | 40 | 880 |
| 1337618 | N/A | N/A | 56329 | 56348 | GCTGGGAACTCACAATTCTC | 14 | 881 |
| 1337640 | N/A | N/A | 65841 | 65860 | GCACGGCAACCCTCCAGGGC | 13 | 882 |
| 1337641 | N/A | N/A | 56972 | 56991 | AAAGGAGCCTACCTTGCCTT | 23 | 883 |
| 1337648 | 4031 | 4050 | 94410 | 94429 | TTGCGGTACATCTGTGTAAA | 12 | 884 |
| 1337726 | N/A | N/A | 71039 | 71058 | CCTGCCCCAGACGCACCGTC | 19 | 885 |
| | | | 71079 | 71098 | | | |
| | | | 71159 | 71178 | | | |
| 1337727 | N/A | N/A | 93284 | 93303 | CCCCTGCACACTCACTCATA | 56 | 886 |
| 1337750 | N/A | N/A | 64896 | 64915 | GGGCTGTCGGTCACTTGTCA | 20 | 887 |
| 1337787 | N/A | N/A | 8838 | 8857 | TCAGAAAATGACCAACTCAC | 45 | 888 |
| | | | 37282 | 37301 | | | |
| 1337842 | N/A | N/A | 82772 | 82791 | GTGAACTTCCTCCCCTTCCG | 46 | 889 |
| 1337851 | N/A | N/A | 86881 | 86900 | TGCCCCAGAACCTCCGAGGT | 49 | 890 |
| 1337860 | N/A | N/A | 87764 | 87783 | CCTCTTGCAAACACACCCTT | 29 | 891 |
| 1337864 | 1598 | 1617 | 71960 | 71979 | CGTACTTGCACTCCTCCTCA | 23 | 892 |
| 1337905 | N/A | N/A | 25667 | 25686 | CGGACACCCACCAGGAGAGC | 42 | 893 |
| 1338005 | N/A | N/A | 62923 | 62942 | ACTGGCTTCTTCTAGAACAC | 11 | 894 |
| 1338020 | N/A | N/A | 62051 | 62070 | CCATCATTACCCACCATGCT | 38 | 895 |
| 1338075 | N/A | N/A | 20425 | 20444 | CCAGGACCCCATCCCAGTGT | 63 | 896 |
| 1338077 | N/A | N/A | 17526 | 17545 | ACAGTGACAACCCCGACCCT | 59 | 897 |
| 1338107 | N/A | N/A | 67935 | 67954 | GATCCACCCTAAATGGTCCA | 13 | 898 |
| 1338130 | N/A | N/A | 24525 | 24544 | TACACCCATTCCATTTCAGC | 32 | 899 |
| 1338131 | N/A | N/A | 55617 | 55636 | CAACAGCAACACACTGGTTC | 19 | 900 |
| 1338150 | N/A | N/A | 27696 | 27715 | GGGAACCTCCTTAGTGGCCC | 37 | 901 |
| 1338169 | N/A | N/A | 73618 | 73637 | ACTGCGACCTCATTCCGCCA | 34 | 902 |
| 1338178 | N/A | N/A | 40087 | 40106 | AACCTGCTATCCCTATGGGC | 29 | 903 |
| 1338181 | N/A | N/A | 42157 | 42176 | AGACGAGGCCTTTAAAGCGG | 34 | 904 |
| 1338211 | N/A | N/A | 47853 | 47872 | TCCGCTAGCTCCTCAGAGTC | 52 | 905 |
| 1338213 | N/A | N/A | 76082 | 76101 | TGACACACAACACACATTAC | 66 | 906 |
| 1338232 | N/A | N/A | 32243 | 32262 | CATGGGTCCACACCTGATGC | 20 | 907 |
| 1338271 | N/A | N/A | 53031 | 53050 | GTGGCCCACCATCCGATGCC | 28 | 908 |
| 1338294 | N/A | N/A | 50430 | 50449 | GGCTGGTGACCCCAACATCT | 28 | 909 |
| 1338333 | N/A | N/A | 57240 | 57259 | CCTGGGTTCCCTACTTACTG | 10 | 910 |
| | | | 58130 | 58149 | | | |
| 1338340 | N/A | N/A | 45592 | 45611 | CACGGCTTCTATCTCACACC | 36 | 911 |
| 1338341 | N/A | N/A | 83760 | 83779 | GTATGCCATCTCCACCTCCT | 28 | 912 |
| 1338352 | N/A | N/A | 34588 | 34607 | AGCCTGTTCATCTCAGCAGC | 48 | 913 |
| 1338355 | N/A | N/A | 58739 | 58758 | GCCTTGACCCTCACTCCCAT | 35 | 914 |
| 1338399 | N/A | N/A | 91676 | 91695 | CCAACCCGCTTCCTAACCCT | 64 | 915 |
| 1338420 | N/A | N/A | 48742 | 48761 | CAAGGCAACACCCAGCCAGC | 36 | 916 |
| 1338427 | N/A | N/A | 54145 | 54164 | GCAGGGTTCACCCCGATGGC | 12 | 917 |
| 1338488 | N/A | N/A | 28627 | 28646 | AATTAGCTAATCATCAGGTT | 65 | 918 |
| 1338519 | 4494 | 4513 | 94873 | 94892 | ACCATCTTCCGCCCAATGCC | 46 | 919 |
| 1338535 | N/A | N/A | 18004 | 18023 | GGAGATAAACTAAACTCTTC | 37 | 920 |
| 1338575 | N/A | N/A | 75525 | 75544 | GCCAGGACAACAACTCAGGA | 29 | 921 |
| 1338581 | N/A | N/A | 18405 | 18424 | GTGAAATCCCATGCCAGCTT | 31 | 922 |
| 1338663 | N/A | N/A | 69794 | 69813 | GCTTGTCCCTAAGTTGGCCA | 21 | 923 |
| 1338686 | N/A | N/A | 21215 | 21234 | AGTCTGTGTCCTCCAAGGGC | 14 | 924 |
| 1338781 | N/A | N/A | 40681 | 40700 | GCAAGTGCCCTCCCCCGACA | 52 | 925 |
| 1338812 | N/A | N/A | 68249 | 68268 | CCCACATGATCTACACTGGA | 49 | 926 |
| 1338839 | N/A | N/A | 81828 | 81847 | ACTGGCCAACCTATGTGGAA | 42 | 927 |
| 1338846 | N/A | N/A | 85971 | 85990 | GCCGAGGTCCCTCCAGTGGC | 53 | 928 |
| 1338952 | N/A | N/A | 23639 | 23658 | CTGCTCCAATAAACCAGACC | 43 | 929 |
| 1338996 | N/A | N/A | 21991 | 22010 | TTGTGGTCCACTTCTCAGCT | 27 | 930 |
| 1339076 | N/A | N/A | 85025 | 85044 | CACGGAGGCCACACTTCCCC | 80 | 931 |
| 1339125 | N/A | N/A | 36189 | 36208 | AGAGGCTCGACCCTATGGCT | 37 | 932 |
| 1339155 | N/A | N/A | 44774 | 44793 | GCTGAAATCTTCTACAGGAA | 49 | 933 |
| 1339181 | N/A | N/A | 27056 | 27075 | ATGTGTCCACCACACGCCCC | 23 | 934 |
| 1339223 | N/A | N/A | 31092 | 31111 | ATACCTGTCTCCCCATTCCT | 29 | 935 |
| 1339225 | N/A | N/A | 90619 | 90638 | CCAGGCTTCACCGAGCTCCT | 31 | 936 |
| 1339227 | N/A | N/A | 92377 | 92396 | GCTCTTTTCCCAAAACCCAT | 16 | 937 |
| 1339235 | N/A | N/A | 42961 | 42980 | AGCTCTGTGCAAACAAGGTC | 39 | 938 |
| 1339288 | N/A | N/A | 79224 | 79243 | GAACACCCAGCCGTTAGCCT | 32 | 939 |
| 1339395 | N/A | N/A | 30341 | 30360 | CCGATGTTCTCCCTCCAAAC | 47 | 940 |
| 1339455 | 4736 | 4755 | 95115 | 95134 | CCAGAATGCATCCATTTAAT | 17 | 941 |
| 1339457 | N/A | N/A | 51532 | 51551 | GAAGTGGTCATCCCTGCACC | 33 | 942 |
| 1339502 | N/A | N/A | 68852 | 68871 | GACAAAGATTTCCCTAGACT | 43 | 943 |
| 1339518 | N/A | N/A | 32564 | 32583 | CGGTGACCACCACCCTCCCC | 48 | 944 |
| 1339521 | N/A | N/A | 49141 | 49160 | TTGTTCTCCCCTCCGCTCCG | 65 | 945 |
| 1339549 | N/A | N/A | 19689 | 19708 | GGCACCCTCTCTTACATCCA | 69 | 946 |
| 1339557 | N/A | N/A | 22925 | 22944 | TGACTGTCCCCCTCTGTTTC | 60 | 947 |
| 1339602 | N/A | N/A | 89256 | 89275 | AGCCCAAGCACACTTCCCAC | 39 | 948 |

TABLE 13
Reduction of KCNT1 RNA by 4,000 nM 5-10-5 MOE gapmers with a mixed backbone measured
with human KCNT1 primer probe set RTS39496

| | SEQ | SEQ | SEQ | SEQ | | | |
|---|---|---|---|---|---|---|---|
| | ID | ID | ID | ID | | | |
| | NO: 1 | NO: 1 | NO: 2 | NO: 2 | | KCNT1 | SEQ |
| Compound | Start | Stop | Start | Stop | | (% | ID |
| Number | Site | Site | Site | Site | Sequence (5′ to 3′) | UTC) | No. |
| 1080855 | 3854 | 3873 | 94233 | 94252 | GTCACGCTAGTGCCACCGTG | 33 | 283 |
| 1081085 | N/A | N/A | 71038 | 71057 | CTGCCCCAGACGCACCGTCA | 17 | 477 |
| | | | 71078 | 71097 | | | |
| | | | 71158 | 71177 | | | |
| 1337229 | N/A | N/A | 24524 | 24543 | ACACCCATTCCATTTCAGCT | 27 | 949 |
| 1337280 | N/A | N/A | 57239 | 57258 | CTGGGTTCCCTACTTACTGA | 35 | 950 |
| | | | 58129 | 58148 | | | |
| 1337291 | N/A | N/A | 90413 | 90432 | GGGCAGTCGCCACTCTGCCT | 57 | 951 |
| 1337347 | N/A | N/A | 62049 | 62068 | ATCATTACCCACCATGCTGA | 44 | 952 |
| 1337468 | N/A | N/A | 36188 | 36207 | GAGGCTCGACCCTATGGCTA | 65 | 953 |
| 1337507 | N/A | N/A | 86756 | 86775 | CTCGGTGATTTTCATCTGCA | 45 | 954 |
| 1337526 | N/A | N/A | 81783 | 81802 | GAGTTCTGACCAACTGACCA | 44 | 955 |
| 1337536 | N/A | N/A | 19687 | 19706 | CACCCTCTCTTACATCCAGT | 60 | 956 |
| 1337577 | N/A | N/A | 82738 | 82757 | GAGCACACCCCTCTGCCGGC | 38 | 957 |
| 1337607 | N/A | N/A | 31091 | 31110 | TACCTGTCTCCCCATTCCTC | 50 | 958 |
| 1337615 | N/A | N/A | 77208 | 77227 | TCGAGGGCACCCACTCCACC | 54 | 959 |
| 1337646 | N/A | N/A | 45591 | 45610 | ACGGCTTCTATCTCACACCC | 31 | 960 |
| 1337653 | N/A | N/A | 50429 | 50448 | GCTGGTGACCCCAACATCTC | 35 | 961 |
| 1337662 | N/A | N/A | 73616 | 73635 | TGCGACCTCATTCCGCCAAC | 38 | 962 |
| 1337670 | N/A | N/A | 32526 | 32545 | ATCGCTCCAGTCCTTGCTTC | 45 | 963 |
| 1337714 | N/A | N/A | 60551 | 60570 | CCTGCTTGCCTCTCGGGCCC | 24 | 964 |
| 1337806 | N/A | N/A | 64886 | 64905 | TCACTTGTCACCATGGCCAT | 38 | 965 |
| 1337850 | N/A | N/A | 32242 | 32261 | ATGGGTCCACACCTGATGCT | 45 | 966 |
| 1337886 | N/A | N/A | 46950 | 46969 | CCCGTCTCACCTCTGCCAGT | 73 | 967 |
| 1337937 | N/A | N/A | 83743 | 83762 | CCTCCCTTTTTCCTTCCGGA | 45 | 968 |
| 1337942 | N/A | N/A | 33661 | 33680 | TCTAGGACTATTATACCCAG | 39 | 969 |
| 1337951 | N/A | N/A | 31551 | 31570 | GCACCCACTTATCACTTCTC | 39 | 970 |
| 1338004 | N/A | N/A | 79217 | 79236 | CAGCCGTTAGCCTCTCGGCC | 59 | 971 |
| 1338082 | N/A | N/A | 78150 | 78169 | AGCTGCTAACTCCAGAAGGA | 38 | 972 |
| 1338087 | N/A | N/A | 54123 | 54142 | GATGGTGACAACCACACCAC | 23 | 973 |
| 1338099 | 1597 | 1616 | 71959 | 71978 | GTACTTGCACTCCTCCTCAC | 59 | 974 |
| 1338103 | N/A | N/A | 17505 | 17524 | CCGTACCCTACACGCTGGAA | 28 | 975 |
| 1338139 | N/A | N/A | 85970 | 85989 | CCGAGGTCCCTCCAGTGGCA | 65 | 976 |
| 1338158 | N/A | N/A | 38452 | 38471 | GCTCAAACCACCGCCAGGAC | 37 | 977 |
| 1338188 | N/A | N/A | 42156 | 42175 | GACGAGGCCTTTAAAGCGGT | 25 | 978 |
| 1338228 | N/A | N/A | 51530 | 51549 | AGTGGTCATCCCTGCACCCA | 51 | 979 |
| 1338231 | N/A | N/A | 30329 | 30348 | CTCCAAACAATTATGCGATT | 50 | 980 |
| 1338270 | N/A | N/A | 40629 | 40648 | TGGAGACCTCTCCTCTGCTT | 56 | 981 |
| 1338276 | N/A | N/A | 55511 | 55530 | GAGCTGCCTTGAACAAGGCT | 32 | 982 |
| 1338304 | N/A | N/A | 68234 | 68253 | CTGGATGGTCCACCCTGAAC | 40 | 983 |
| 1338343 | N/A | N/A | 92374 | 92393 | CTTTTCCCAAAACCCATGGT | 52 | 984 |
| 1338348 | N/A | N/A | 67927 | 67946 | CTAAATGGTCCACCCCGGAC | 61 | 985 |
| 1338367 | N/A | N/A | 85024 | 85043 | ACGGAGGCCACACTTCCCCC | 49 | 986 |
| 1338398 | N/A | N/A | 8836 | 8855 | AGAAAATGACCAACTCACTG | 59 | 987 |
| | | | 37280 | 37299 | | | |
| 1338440 | N/A | N/A | 18978 | 18997 | GGCCAGGTCCACTCCCATCC | 47 | 988 |
| 1338462 | N/A | N/A | 44771 | 44790 | GAAATCTTCTACAGGAAGCC | 49 | 989 |
| 1338479 | N/A | N/A | 47745 | 47764 | CCGGCTGTTCCCCTCCACCT | 36 | 990 |
| 1338492 | N/A | N/A | 21990 | 22009 | TGTGGTCCACTTCTCAGCTT | 30 | 991 |
| 1338521 | N/A | N/A | 69721 | 69740 | CTGGATTTGTCCATACTCCC | 57 | 992 |
| 1338537 | 3982 | 4001 | 94361 | 94380 | TAGGTTAAAAAACTCTCCTC | 27 | 993 |
| 1338555 | N/A | N/A | 68851 | 68870 | ACAAAGATTTCCCTAGACTT | 70 | 994 |
| 1338556 | N/A | N/A | 42940 | 42959 | GTCGGCTGCACAAACCCTGC | 30 | 995 |
| 1338574 | N/A | N/A | 93255 | 93274 | GCATGCCGTCCTCCACATCC | 27 | 996 |
| 1338604 | N/A | N/A | 87666 | 87685 | CTGGGTGGCACCTTCAGAAA | 33 | 997 |
| 1338641 | 4490 | 4509 | 94869 | 94888 | TCTTCCGCCCAATGCCCCCT | 39 | 998 |
| 1338649 | N/A | N/A | 23637 | 23656 | GCTCCAATAAACCAGACCTT | 35 | 999 |
| 1338656 | N/A | N/A | 27589 | 27608 | AACTGAGTGCCCAAAACTAC | 45 | 1000 |
| 1338660 | N/A | N/A | 56327 | 56346 | TGGGAACTCACAATTCTCAA | 19 | 1001 |
| 1338684 | N/A | N/A | 18003 | 18022 | GAGATAAACTAAACTCTTCA | 62 | 1002 |
| 1338687 | N/A | N/A | 20424 | 20443 | CAGGACCCCATCCCAGTGTC | 42 | 1003 |
| 1338746 | N/A | N/A | 91670 | 91689 | CGCTTCCTAACCCTGCAGGC | 42 | 1004 |
| 1338758 | 4735 | 4754 | 95114 | 95133 | CAGAATGCATCCATTTAATA | 30 | 1005 |
| 1338798 | N/A | N/A | 93688 | 93707 | GAGCTGAGTCTTTCCGGCCT | 44 | 1006 |
| 1338849 | N/A | N/A | 89251 | 89270 | AAGCACACTTCCCACCACAA | 35 | 1007 |
| 1338863 | N/A | N/A | 25665 | 25684 | GACACCCACCAGGAGAGCCA | 68 | 1008 |
| 1338887 | N/A | N/A | 53029 | 53048 | GGCCCACCATCCGATGCCCA | 25 | 1009 |
| 1338977 | N/A | N/A | 18400 | 18419 | ATCCCATGCCAGCTTCTCCT | 52 | 1010 |
| 1338990 | N/A | N/A | 28549 | 28568 | GTCCGTAGCAGAACTTGGCT | 25 | 1011 |
| 1339023 | N/A | N/A | 62903 | 62922 | AGAGACTCGCTCATCAGCGA | 38 | 1012 |
| 1339057 | N/A | N/A | 56971 | 56990 | AAGGAGCCTACCTTGCCTTT | 32 | 1013 |
| 1339080 | N/A | N/A | 75342 | 75361 | CCCAGCTCCATCCTGATTCA | 65 | 1014 |
| 1339172 | N/A | N/A | 22918 | 22937 | CCCCCTCTGTTTCAAAGCTC | 54 | 1015 |
| 1339209 | N/A | N/A | 48740 | 48759 | AGGCAACACCCAGCCAGCTC | 55 | 1016 |
| 1339265 | N/A | N/A | 40086 | 40105 | ACCTGCTATCCCTATGGGCC | 45 | 1017 |
| 1339285 | N/A | N/A | 58736 | 58755 | TTGACCCTCACTCCCATGTC | 62 | 1018 |
| 1339385 | N/A | N/A | 49046 | 49065 | GGTGACTTCCCAACTGGCTC | 48 | 1019 |
| 1339443 | N/A | N/A | 76013 | 76032 | GACACACCCCCCTTGCACAC | 56 | 1020 |
| 1339450 | N/A | N/A | 27055 | 27074 | TGTGTCCACCACACGCCCCC | 38 | 1021 |
| 1339516 | N/A | N/A | 21032 | 21051 | ATGCTGCTCCATGGGAGCAC | 63 | 1022 |
| 1339607 | N/A | N/A | 65839 | 65858 | ACGGCAACCCTCCAGGGCCG | 50 | 1023 |
| 1339653 | N/A | N/A | 34555 | 34574 | GGAGACCACAGAACTCCAGA | 41 | 1024 |

TABLE 14
Reduction of KCNT1 RNA by 4,000 nM 5-10-5 MOE gapmers with a mixed backbone measured
with human KCNT1 primer probe set RTS39496

| | SEQ | SEQ | SEQ | SEQ | | | |
|---|---|---|---|---|---|---|---|
| | ID | ID | ID | ID | | | |
| | NO: 1 | NO: 1 | NO: 2 | NO: 2 | | KCNT1 | SEQ |
| Compound | Start | Stop | Start | Stop | | (% | ID |
| Number | Site | Site | Site | Site | Sequence (5′ to 3′) | UTC) | No. |
| 1080855 | 3854 | 3873 | 94233 | 94252 | GTCACGCTAGTGCCACCGTG | 34 | 283 |
| 1337227 | N/A | N/A | 78102 | 78121 | CTACTGACCCCAGCTTGCCA | 79 | 1025 |
| 1337248 | N/A | N/A | 75247 | 75266 | GCCTGACAGCCCCTGTGCCA | 34 | 1026 |
| 1337290 | N/A | N/A | 87662 | 87681 | GTGGCACCTTCAGAAAGGCC | 22 | 1027 |
| 1337326 | N/A | N/A | 93679 | 93698 | CTTTCCGGCCTTCCTGACCA | 34 | 1028 |
| 1337331 | N/A | N/A | 68815 | 68834 | GAGCTCGCAAAAGGCTGCCC | 55 | 1029 |
| 1337338 | N/A | N/A | 36129 | 36148 | AACTGCCCTTTTAGAGAGCA | 50 | 1030 |
| 1337342 | N/A | N/A | 40628 | 40647 | GGAGACCTCTCCTCTGCTTC | 39 | 1031 |
| 1337346 | N/A | N/A | 21952 | 21971 | TGGTGTTGCTCAACTCCAGA | 27 | 1032 |
| 1337351 | N/A | N/A | 85019 | 85038 | GGCCACACTTCCCCCCGGAA | 54 | 1033 |
| 1337358 | N/A | N/A | 21014 | 21033 | ACCCGAGACACCATCTGGTA | 63 | 1034 |
| 1337359 | N/A | N/A | 25529 | 25548 | CGCACAGGCACAAAATGCCC | 41 | 1035 |
| 1337363 | N/A | N/A | 93254 | 93273 | CATGCCGTCCTCCACATCCA | 24 | 1036 |
| 1337386 | N/A | N/A | 44738 | 44757 | GGGCATCAACCAGAATGCGG | 50 | 1037 |
| 1337427 | N/A | N/A | 68232 | 68251 | GGATGGTCCACCCTGAACAG | 47 | 1038 |
| 1337428 | N/A | N/A | 23623 | 23642 | GACCTTGACTCAATCATGCA | 22 | 1039 |
| 1337500 | N/A | N/A | 18368 | 18387 | GGCATGGTTCTCTCTAGGCG | 12 | 1040 |
| 1337587 | N/A | N/A | 82605 | 82624 | CGAGCATCCCCCTACGCCTC | 47 | 1041 |
| 1337626 | N/A | N/A | 81774 | 81793 | CCAACTGACCATGCCAGGAC | 19 | 1042 |
| 1337647 | N/A | N/A | 89248 | 89267 | CACACTTCCCACCACAAGGC | 33 | 1043 |
| 1337741 | N/A | N/A | 47744 | 47763 | CGGCTGTTCCCCTCCACCTG | 47 | 1044 |
| 1337768 | N/A | N/A | 34551 | 34570 | ACCACAGAACTCCAGAAGCA | 43 | 1045 |
| 1337796 | N/A | N/A | 48694 | 48713 | CCCCCAACCCTCCATCGGTC | 63 | 1046 |
| 1337804 | N/A | N/A | 27588 | 27607 | ACTGAGTGCCCAAAACTACA | 53 | 1047 |
| 1337813 | 4733 | 4752 | 95112 | 95131 | GAATGCATCCATTTAATAGA | 30 | 1048 |
| 1337823 | N/A | N/A | 71036 | 71055 | GCCCCAGACGCACCGTCACA | 26 | 1049 |
| 1337877 | N/A | N/A | 92299 | 92318 | AGGGAGACACACCCTCCCCA | 69 | 1050 |
| 1337955 | N/A | N/A | 83740 | 83759 | CCCTTTTTCCTTCCGGAGTC | 37 | 1051 |
| 1337989 | N/A | N/A | 27048 | 27067 | ACCACACGCCCCCCCACGCA | 60 | 1052 |
| 1338104 | N/A | N/A | 45590 | 45609 | CGGCTTCTATCTCACACCCG | 42 | 1053 |
| 1338145 | N/A | N/A | 62900 | 62919 | GACTCGCTCATCAGCGAGAA | 65 | 1054 |
| 1338148 | N/A | N/A | 20423 | 20442 | AGGACCCCATCCCAGTGTCC | 76 | 1055 |
| 1338168 | N/A | N/A | 38123 | 38142 | TTGCCTGTCCTCACCAGGGT | 26 | 1056 |
| 1338171 | N/A | N/A | 50428 | 50447 | CTGGTGACCCCAACATCTCC | 24 | 1057 |
| 1338183 | N/A | N/A | 69720 | 69739 | TGGATTTGTCCATACTCCCA | 49 | 1058 |
| 1338287 | N/A | N/A | 31550 | 31569 | CACCCACTTATCACTTCTCA | 44 | 1059 |
| 1338298 | N/A | N/A | 56324 | 56343 | GAACTCACAATTCTCAAACT | 44 | 1060 |
| 1338315 | N/A | N/A | 58108 | 58127 | CCTGTCTGTCTTCAGCATTC | 17 | 1061 |
| 1338323 | N/A | N/A | 75989 | 76008 | CCCCATGCCCTACTCGGTCT | 55 | 1062 |
| 1338383 | N/A | N/A | 85840 | 85859 | CATGTGTGCATACACCGGCA | 39 | 1063 |
| 1338388 | N/A | N/A | 24523 | 24542 | CACCCATTCCATTTCAGCTG | 26 | 1064 |
| 1338396 | N/A | N/A | 58735 | 58754 | TGACCCTCACTCCCATGTCA | 25 | 1065 |
| 1338430 | N/A | N/A | 73607 | 73626 | ATTCCGCCAACTCCTGGCCC | 42 | 1066 |
| 1338432 | N/A | N/A | 19684 | 19703 | CCTCTCTTACATCCAGTCGA | 52 | 1067 |
| 1338433 | N/A | N/A | 17441 | 17460 | CGTGAGTCCTCAGAGCACTT | 23 | 1068 |
| 1338435 | 1596 | 1615 | 71958 | 71977 | TACTTGCACTCCTCCTCACA | 47 | 1069 |
| 1338508 | N/A | N/A | 31082 | 31101 | CCCCATTCCTCCTTTGTATA | 45 | 1070 |
| 1338546 | N/A | N/A | 18001 | 18020 | GATAAACTAAACTCTTCACC | 53 | 1071 |
| 1338626 | 4489 | 4508 | 94868 | 94887 | CTTCCGCCCAATGCCCCCTA | 25 | 1072 |
| 1338629 | N/A | N/A | 51520 | 51539 | CCTGCACCCACCTCGCAGGC | 104 | 1073 |
| 1338634 | N/A | N/A | 42938 | 42957 | CGGCTGCACAAACCCTGCCA | 47 | 1074 |
| 1338638 | N/A | N/A | 86755 | 86774 | TCGGTGATTTTCATCTGCAG | 77 | 1075 |
| 1338675 | N/A | N/A | 65787 | 65806 | CCGTAGTGACCCTAAAAGTC | 49 | 1076 |
| 1338716 | N/A | N/A | 49045 | 49064 | GTGACTTCCCAACTGGCTCT | 60 | 1077 |
| 1338755 | N/A | N/A | 28519 | 28538 | GCCTCGCTTTACCCTCCCAA | 41 | 1078 |
| 1338789 | N/A | N/A | 33659 | 33678 | TAGGACTATTATACCCAGCC | 18 | 1079 |
| 1338800 | N/A | N/A | 54120 | 54139 | GGTGACAACCACACCACACA | 13 | 1080 |
| 1338828 | N/A | N/A | 40085 | 40104 | CCTGCTATCCCTATGGGCCC | 28 | 1081 |
| 1338869 | N/A | N/A | 62036 | 62055 | ATGCTGAGCACCACCGGACC | 31 | 1082 |
| 1338881 | N/A | N/A | 42155 | 42174 | ACGAGGCCTTTAAAGCGGTC | 37 | 1083 |
| 1338882 | N/A | N/A | 32210 | 32229 | TCCAGGGAACCCCTTTCCTT | 35 | 1084 |
| 1338923 | N/A | N/A | 90397 | 90416 | GCCTGGCGGCCAACAGCACC | 22 | 1085 |
| 1338961 | N/A | N/A | 18974 | 18993 | AGGTCCACTCCCATCCTTCA | 28 | 1086 |
| 1339007 | N/A | N/A | 22916 | 22935 | CCCTCTGTTTCAAAGCTCCA | 27 | 1087 |
| 1339060 | N/A | N/A | 64877 | 64896 | ACCATGGCCATACCCATCGA | 48 | 1088 |
| 1339063 | N/A | N/A | 56924 | 56943 | GAAGGTTCCCCAAGAGAGGA | 29 | 1089 |
| 1339067 | N/A | N/A | 79215 | 79234 | GCCGTTAGCCTCTCGGCCCA | 39 | 1090 |
| 1339073 | N/A | N/A | 91669 | 91688 | GCTTCCTAACCCTGCAGGCC | 14 | 1091 |
| 1339099 | N/A | N/A | 30187 | 30206 | GCTACGCTTCCTTGGAGGCC | 27 | 1092 |
| 1339280 | N/A | N/A | 37259 | 37278 | CGCTCCCGATACCTGCCCTA | 48 | 1093 |
| 1339340 | N/A | N/A | 32517 | 32536 | GTCCTTGCTTCCCCTGCTCA | 42 | 1094 |
| 1339380* | N/A | N/A | 52941 | 52960 | AACAGCCGGATCCTCAGGCC | 13 | 1095 |
| 1339431 | N/A | N/A | 55469 | 55488 | AGAGGAAGCTCCTATCCCCA | 10 | 1096 |
| 1339437 | 3981 | 4000 | 94360 | 94379 | AGGTTAAAAAACTCTCCTCA | 17 | 1097 |
| 1339482 | N/A | N/A | 67913 | 67932 | CCGGACGATCCACCCTGGAC | 53 | 1098 |
| 1339529 | N/A | N/A | 60517 | 60536 | GGTGCTCACACTGACGGCCG | 16 | 1099 |
| 1339601 | N/A | N/A | 46847 | 46866 | CCGGTGAGACTCATGGGCAT | 36 | 1100 |
| 1339616 | N/A | N/A | 77206 | 77225 | GAGGGCACCCACTCCACCCA | 80 | 1101 |

TABLE 15
Reduction of KCNT1 RNA by 4,000 nM 5-10-5 MOE gapmers with a mixed backbone measured
with human KCNT1 primer probe set RTS39496

| | SEQ | SEQ | SEQ | SEQ | | | |
|---|---|---|---|---|---|---|---|
| | ID | ID | ID | ID | | | |
| | NO: 1 | NO: 1 | NO: 2 | NO: 2 | | KCNT1 | SEQ |
| Compound | Start | Stop | Start | Stop | | (% | ID |
| Number | Site | Site | Site | Site | Sequence (5′ to 3′) | UTC) | No. |
| 1080855 | 3854 | 3873 | 94233 | 94252 | GTCACGCTAGTGCCACCGTG | 12 | 283 |
| 1337219 | N/A | N/A | 67912 | 67931 | CGGACGATCCACCCTGGACA | 38 | 1102 |
| 1337242 | N/A | N/A | 58099 | 58118 | CTTCAGCATTCACTAAAGTC | 20 | 1103 |
| 1337315 | N/A | N/A | 71035 | 71054 | CCCCAGACGCACCGTCACAC | 17 | 1104 |
| 1337373 | N/A | N/A | 75172 | 75191 | TAGCCCAGCACACCCCATCT | 67 | 1105 |
| 1337410 | N/A | N/A | 85018 | 85037 | GCCACACTTCCCCCCGGAAC | 40 | 1106 |
| 1337430 | N/A | N/A | 64873 | 64892 | TGGCCATACCCATCGATGCA | 23 | 1107 |
| 1337436 | N/A | N/A | 61928 | 61947 | TGCCACAGCCTCAGTGGCAC | 54 | 1108 |
| 1337530 | N/A | N/A | 55425 | 55444 | CCTAAGCTGCTTCTGAGGAC | 20 | 1109 |
| 1337546 | N/A | N/A | 46782 | 46801 | TCAGACAGTCCCTTGTGTAC | 56 | 1110 |
| 1337558 | N/A | N/A | 73504 | 73523 | GTTGAGCTGCCAACCGGTCC | 55 | 1111 |
| 1337573 | N/A | N/A | 49017 | 49036 | CCGTCCAGCCCCACTCTACC | 49 | 1112 |
| 1337594 | N/A | N/A | 82586 | 82605 | CAGGCTGGCATCTCTAAGGC | 39 | 1113 |
| 1337600 | N/A | N/A | 47687 | 47706 | GGACAGGGACCAACTCCCGG | 29 | 1114 |
| 1337617 | N/A | N/A | 32500 | 32519 | TCATCTCCTTCTCCAGCGAC | 33 | 1115 |
| 1337671 | N/A | N/A | 56819 | 56838 | CCTGCAGCCCATGACACTAC | 38 | 1116 |
| 1337682 | N/A | N/A | 24465 | 24484 | GCATTGGGAATTACAACCTG | 27 | 1117 |
| 1337683 | N/A | N/A | 71775 | 71794 | GTCTGTGGACCTCAACCCCC | 10 | 1118 |
| 1337685 | N/A | N/A | 93628 | 93647 | AGCCAGGGCCCATCCCTGAC | 36 | 1119 |
| 1337722 | N/A | N/A | 42154 | 42173 | CGAGGCCTTTAAAGCGGTCA | 10 | 1120 |
| 1337737 | N/A | N/A | 75979 | 75998 | TACTCGGTCTTTCTCCTCCC | 33 | 1121 |
| 1337814 | N/A | N/A | 92217 | 92236 | GAGGGCAGCTCTAGTAGGTT | 13 | 1122 |
| 1337866 | N/A | N/A | 68228 | 68247 | GGTCCACCCTGAACAGTCCA | 20 | 1123 |
| 1337878 | N/A | N/A | 51436 | 51455 | ACTGGTTCCCAGACACCCCT | 35 | 1124 |
| 1337882 | N/A | N/A | 85836 | 85855 | TGTGCATACACCGGCAGGCC | 20 | 1125 |
| 1337931 | N/A | N/A | 18973 | 18992 | GGTCCACTCCCATCCTTCAC | 22 | 1126 |
| 1337977 | N/A | N/A | 69657 | 69676 | GTGGAGACCCCACCTAGGTG | 28 | 1127 |
| 1338039 | N/A | N/A | 65786 | 65805 | CGTAGTGACCCTAAAAGTCC | 28 | 1128 |
| 1338121 | N/A | N/A | 89247 | 89266 | ACACTTCCCACCACAAGGCG | 50 | 1129 |
| 1338138 | N/A | N/A | 93253 | 93272 | ATGCCGTCCTCCACATCCAC | 35 | 1130 |
| 1338152 | N/A | N/A | 26994 | 27013 | CGCTGCTTCCACCAAGATTA | 27 | 1131 |
| 1338167 | N/A | N/A | 48686 | 48705 | CCTCCATCGGTCATAGGCCT | 35 | 1132 |
| 1338175* | N/A | N/A | 52795 | 52814 | ACGCAGAGCTCTGTGTGCCC | 20 | 1133 |
| 1338210 | N/A | N/A | 31547 | 31566 | CCACTTATCACTTCTCAGTT | 32 | 1134 |
| 1338223 | N/A | N/A | 60406 | 60425 | GTGGAAGTCATTCTGTGGAA | 58 | 1135 |
| 1338230 | N/A | N/A | 30076 | 30095 | TCACACGGCCATCTCCTTCT | 55 | 1136 |
| 1338253 | N/A | N/A | 27586 | 27605 | TGAGTGCCCAAAACTACAGC | 36 | 1137 |
| 1338259 | N/A | N/A | 68747 | 68766 | GGCTGCTCCACAGTGGGTAT | 22 | 1138 |
| 1338275 | N/A | N/A | 40002 | 40021 | GATCACTGCCCTCCCCCTTC | 37 | 1139 |
| 1338356 | N/A | N/A | 33658 | 33677 | AGGACTATTATACCCAGCCA | 13 | 1140 |
| 1338359 | N/A | N/A | 77205 | 77224 | AGGGCACCCACTCCACCCAC | 66 | 1141 |
| 1338397 | N/A | N/A | 58731 | 58750 | CCTCACTCCCATGTCAGGAC | 52 | 1142 |
| 1338442 | N/A | N/A | 54119 | 54138 | GTGACAACCACACCACACAC | 17 | 1143 |
| 1338450 | N/A | N/A | 22912 | 22931 | CTGTTTCAAAGCTCCAGCTA | 22 | 1144 |
| 1338453 | N/A | N/A | 17996 | 18015 | ACTAAACTCTTCACCTGGGC | 10 | 1145 |
| 1338500 | N/A | N/A | 37255 | 37274 | CCCGATACCTGCCCTAGCGC | 26 | 1146 |
| 1338512 | N/A | N/A | 36128 | 36147 | ACTGCCCTTTTAGAGAGCAC | 23 | 1147 |
| 1338530 | N/A | N/A | 38112 | 38131 | CACCAGGGTCCTCACCCCCC | 45 | 1148 |
| 1338543 | N/A | N/A | 79200 | 79219 | GCCCACAGCCCTTTCACGGC | 35 | 1149 |
| 1338578 | N/A | N/A | 19680 | 19699 | TCTTACATCCAGTCGAGGCA | 66 | 1150 |
| 1338635 | N/A | N/A | 78101 | 78120 | TACTGACCCCAGCTTGCCAT | 31 | 1151 |
| 1338744 | N/A | N/A | 91627 | 91646 | GCTCTTGGCATCCACGGTCA | 20 | 1152 |
| 1338759 | N/A | N/A | 21013 | 21032 | CCCGAGACACCATCTGGTAA | 23 | 1153 |
| 1338784 | N/A | N/A | 90386 | 90405 | AACAGCACCTTGACTAGCAC | 16 | 1154 |
| 1338802 | 4483 | 4502 | 94862 | 94881 | CCCAATGCCCCCTAGATGCA | 22 | 1155 |
| 1338823 | N/A | N/A | 62812 | 62831 | GGCCGACAACCAGATGGAAA | 13 | 1156 |
| 1338830 | N/A | N/A | 25528 | 25547 | GCACAGGCACAAAATGCCCC | 15 | 1157 |
| 1338844 | N/A | N/A | 42937 | 42956 | GGCTGCACAAACCCTGCCAA | 41 | 1158 |
| 1338866 | N/A | N/A | 20392 | 20411 | CCTAAGGGCTTTCTCACCCA | 47 | 1159 |
| 1338868 | N/A | N/A | 86752 | 86771 | GTGATTTTCATCTGCAGGGT | 50 | 1160 |
| 1338872 | N/A | N/A | 32209 | 32228 | CCAGGGAACCCCTTTCCTTG | 19 | 1161 |
| 1338970 | 4730 | 4749 | 95109 | 95128 | TGCATCCATTTAATAGAAGT | 18 | 1162 |
| 1338972 | N/A | N/A | 45588 | 45607 | GCTTCTATCTCACACCCGTC | 40 | 1163 |
| 1338989 | N/A | N/A | 31081 | 31100 | CCCATTCCTCCTTTGTATAA | 53 | 1164 |
| 1339003 | N/A | N/A | 50406 | 50425 | AAGTGATTAAAACATTCGAT | 63 | 1165 |
| 1339043 | N/A | N/A | 17424 | 17443 | CTTGCCTTCACTTGCAGGCA | 36 | 1166 |
| 1339083 | N/A | N/A | 81748 | 81767 | CCTTGGCCTCCAGATACGGC | 57 | 1167 |
| 1339202 | N/A | N/A | 40627 | 40646 | GAGACCTCTCCTCTGCTTCA | 36 | 1168 |
| 1339239 | N/A | N/A | 23620 | 23639 | CTTGACTCAATCATGCAGGT | 21 | 1169 |
| 1339312 | N/A | N/A | 56322 | 56341 | ACTCACAATTCTCAAACTGC | 10 | 1170 |
| 1339444 | N/A | N/A | 28518 | 28537 | CCTCGCTTTACCCTCCCAAC | 33 | 1171 |
| 1339463 | N/A | N/A | 18367 | 18386 | GCATGGTTCTCTCTAGGCGG | 29 | 1172 |
| 1339487 | N/A | N/A | 83705 | 83724 | TCTTTATCCTTCCACTGGGC | 52 | 1173 |
| 1339489 | N/A | N/A | 34550 | 34569 | CCACAGAACTCCAGAAGCAA | 57 | 1174 |
| 1339492 | N/A | N/A | 44413 | 44432 | GTGACAACCACACTCGAGGA | 44 | 1175 |
| 1339511 | N/A | N/A | 87564 | 87583 | CACCTGGTGTCCAAACTCAC | 40 | 1176 |
| 1339614 | 3980 | 3999 | 94359 | 94378 | GGTTAAAAAACTCTCCTCAC | 22 | 1177 |
| 1339658 | N/A | N/A | 21950 | 21969 | GTGTTGCTCAACTCCAGAGA | 32 | 1178 |

TABLE 16
Reduction of KCNT1 RNA by 4,000 nM 5-10-5 MOE gapmers with a mixed backbone measured
with human KCNT1 primer probe set RTS39496

| | SEQ | SEQ | | | | | |
|---|---|---|---|---|---|---|---|
| | ID | ID | SEQ | SEQ | | | |
| | NO: | NO: | ID | ID | | | |
| | 1 | 1 | NO: 2 | NO: 2 | | KCNT1 | SEQ |
| Compound | Start | Stop | Start | Stop | | (% | ID |
| Number | Site | Site | Site | Site | Sequence (5′ to 3′) | UTC) | No. |
| 1080855 | 3854 | 3873 | 94233 | 94252 | GTCACGCTAGTGCCACCGTG | 20 | 283 |
| 1337237 | N/A | N/A | 73460 | 73479 | CACTTGGACACAGTGAGCAA | 33 | 1179 |
| 1337310 | N/A | N/A | 56320 | 56339 | TCACAATTCTCAAACTGCTC | 22 | 1180 |
| 1337334 | N/A | N/A | 25484 | 25503 | TGCACAAGAACTTCCTGCCA | 18 | 1181 |
| 1337387 | N/A | N/A | 61916 | 61935 | AGTGGCACCCTCCCTCTACT | 26 | 1182 |
| 1337418 | N/A | N/A | 27584 | 27603 | AGTGCCCAAAACTACAGCGG | 30 | 1183 |
| 1337437 | N/A | N/A | 26993 | 27012 | GCTGCTTCCACCAAGATTAC | 48 | 1184 |
| 1337484 | N/A | N/A | 48648 | 48667 | TCCCTTTACCTCCCCGTGGA | 63 | 1185 |
| 1337492 | N/A | N/A | 20386 | 20405 | GGCTTTCTCACCCAGAGCCG | 39 | 1186 |
| 1337495 | N/A | N/A | 85820 | 85839 | GGCCTGAACCAGCTCTATCT | 47 | 1187 |
| 1337542 | 4729 | 4748 | 95108 | 95127 | GCATCCATTTAATAGAAGTT | 6 | 1188 |
| 1337551 | N/A | N/A | 86668 | 86687 | GGCAGGTGCCCATCCACCCA | 37 | 1189 |
| 1337620 | N/A | N/A | 71774 | 71793 | TCTGTGGACCTCAACCCCCT | 31 | 1190 |
| 1337687 | N/A | N/A | 62789 | 62808 | GCGCACGGCCCCATCTGAAC | 21 | 1191 |
| 1337703 | N/A | N/A | 81747 | 81766 | CTTGGCCTCCAGATACGGCC | 72 | 1192 |
| 1337723 | 3979 | 3998 | 94358 | 94377 | GTTAAAAAACTCTCCTCACT | 26 | 1193 |
| 1337738 | N/A | N/A | 68218 | 68237 | GAACAGTCCATCCCAGATGA | 38 | 1194 |
| 1337743 | N/A | N/A | 79199 | 79218 | CCCACAGCCCTTTCACGGCC | 54 | 1195 |
| 1337827 | N/A | N/A | 40471 | 40490 | CCACACCTGCCTCTCGGCTC | 17 | 1196 |
| 1337838 | N/A | N/A | 31056 | 31075 | GGCCTTAGTCCTATTGAATT | 32 | 1197 |
| 1337844 | N/A | N/A | 32176 | 32195 | AGGCTGCAATTCAACACTGC | 25 | 1198 |
| 1337900 | N/A | N/A | 37222 | 37241 | GCTGAGTAAGGAAAATCCCC | 23 | 1199 |
| 1337908 | N/A | N/A | 58027 | 58046 | GGTCCCCTGTTTACTGATCC | 21 | 1200 |
| 1337909 | N/A | N/A | 77145 | 77164 | GCCCGTTCTTCCCTTAACCA | 33 | 1201 |
| 1337919 | N/A | N/A | 50392 | 50411 | TTCGATGTTTCCCAAAGCTC | 13 | 1202 |
| 1337957 | N/A | N/A | 23529 | 23548 | ATGGCCGGCACCCTCCCCCG | 30 | 1203 |
| 1337976 | N/A | N/A | 69583 | 69602 | GAGACATTCACCCAGGGCTG | 11 | 1204 |
| 1338002 | N/A | N/A | 55408 | 55427 | GACAAGCGGCCCCCAAGCCA | 21 | 1205 |
| 1338003 | N/A | N/A | 67911 | 67930 | GGACGATCCACCCTGGACAG | 28 | 1206 |
| 1338010 | N/A | N/A | 87563 | 87582 | ACCTGGTGTCCAAACTCACA | 15 | 1207 |
| 1338046 | N/A | N/A | 56790 | 56809 | CAAAGCTTCTCCTCTCTGGA | 24 | 1208 |
| 1338051 | N/A | N/A | 58720 | 58739 | TGTCAGGACAGTCTTAGCCA | 22 | 1209 |
| 1338094 | N/A | N/A | 24460 | 24479 | GGGAATTACAACCTGAAGCC | 18 | 1210 |
| 1338135 | N/A | N/A | 34530 | 34549 | GCGGAGAGCCCACACGCCAT | 41 | 1211 |
| 1338176 | N/A | N/A | 17368 | 17387 | GCTGGGTGTTTACCCAAGAC | 26 | 1212 |
| 1338195 | N/A | N/A | 75978 | 75997 | ACTCGGTCTTTCTCCTCCCA | 32 | 1213 |
| 1338199 | N/A | N/A | 64871 | 64890 | GCCATACCCATCGATGCAAT | 16 | 1214 |
| 1338202 | N/A | N/A | 51420 | 51439 | CCCTCAACCCCCATGCACGC | 50 | 1215 |
| 1338215 | N/A | N/A | 92164 | 92183 | GTGACGAGCACCCAGTGGGA | 10 | 1216 |
| 1338225 | N/A | N/A | 89246 | 89265 | CACTTCCCACCACAAGGCGC | 36 | 1217 |
| 1338226 | N/A | N/A | 84998 | 85017 | CAGAACTCGATTCACAGGTA | 20 | 1218 |
| 1338303 | N/A | N/A | 54079 | 54098 | CGCCTGAGCACTCTTACGCA | 20 | 1219 |
| 1338328 | N/A | N/A | 18924 | 18943 | TCTGAGGCCATCTTGAGGGA | 49 | 1220 |
| 1338387 | N/A | N/A | 44396 | 44415 | GGAGAGGGCCACCCTTCAGC | 41 | 1221 |
| 1338392 | N/A | N/A | 68641 | 68660 | TCTACCCCAGACAATCCACC | 56 | 1222 |
| 1338460 | N/A | N/A | 21949 | 21968 | TGTTGCTCAACTCCAGAGAA | 43 | 1223 |
| 1338627 | N/A | N/A | 41902 | 41921 | GCAAACACCCCTGAAAGACA | 41 | 1224 |
| 1338724 | N/A | N/A | 18354 | 18373 | TAGGCGGACAGCAAAAGCCT | 36 | 1225 |
| 1338760* | N/A | N/A | 52750 | 52769 | TGGGTCAGCCTCCAAGAGGC | 21 | 1226 |
| 1338786 | N/A | N/A | 17995 | 18014 | CTAAACTCTTCACCTGGGCA | 28 | 1227 |
| 1338854 | N/A | N/A | 82585 | 82604 | AGGCTGGCATCTCTAAGGCA | 22 | 1228 |
| 1338861 | N/A | N/A | 42857 | 42876 | ATCCGCAGCATCCAAACCCA | 41 | 1229 |
| 1338934 | N/A | N/A | 65777 | 65796 | CCTAAAAGTCCTATCTGCCC | 28 | 1230 |
| 1338939 | N/A | N/A | 46672 | 46691 | CCATGGCGAACAACTTGTCC | 29 | 1231 |
| 1338941 | N/A | N/A | 19669 | 19688 | GTCGAGGCAATTTCTCAGGA | 26 | 1232 |
| 1338960 | N/A | N/A | 93626 | 93645 | CCAGGGCCCATCCCTGACCG | 65 | 1233 |
| 1339027 | N/A | N/A | 33551 | 33570 | GTTGGGAGAAAAACAACCAC | 24 | 1234 |
| 1339031 | N/A | N/A | 35848 | 35867 | TTATGACACCCATTCTGGAC | 67 | 1235 |
| 1339040 | N/A | N/A | 31546 | 31565 | CACTTATCACTTCTCAGTTC | 38 | 1236 |
| 1339072 | N/A | N/A | 90380 | 90399 | ACCTTGACTAGCACAAGCCC | 15 | 1237 |
| 1339085 | N/A | N/A | 75168 | 75187 | CCAGCACACCCCATCTCAGT | 50 | 1238 |
| 1339111 | N/A | N/A | 47625 | 47644 | GCTGAGATAGAAACAATGGC | 31 | 1239 |
| 1339135 | N/A | N/A | 22909 | 22928 | TTTCAAAGCTCCAGCTACAC | 45 | 1240 |
| 1339165 | N/A | N/A | 60122 | 60141 | CCCACGGCCACACCTGTGTC | 49 | 1241 |
| 1339189 | N/A | N/A | 49015 | 49034 | GTCCAGCCCCACTCTACCCT | 65 | 1242 |
| 1339190 | N/A | N/A | 91618 | 91637 | ATCCACGGTCACTCCCGCCT | 32 | 1243 |
| 1339216 | 4481 | 4500 | 94860 | 94879 | CAATGCCCCCTAGATGCAGT | 20 | 1244 |
| 1339221 | N/A | N/A | 78078 | 78097 | ATCCAAGTAAACATCGCCAG | 43 | 1245 |
| 1339297 | N/A | N/A | 71033 | 71052 | CCAGACGCACCGTCACACAT | 29 | 1246 |
| 1339346 | N/A | N/A | 20985 | 21004 | GAGGGTCCACCATCAGGTCC | 31 | 1247 |
| 1339392 | N/A | N/A | 38104 | 38123 | TCCTCACCCCCCAATTCCTA | 44 | 1248 |
| 1339447 | N/A | N/A | 39987 | 40006 | CCTTCCCCCCACGCCAGCAT | 51 | 1249 |
| 1339468 | N/A | N/A | 32491 | 32510 | TCTCCAGCGACTCTGAACCT | 24 | 1250 |
| 1339552 | N/A | N/A | 83704 | 83723 | CTTTATCCTTCCACTGGGCC | 47 | 1251 |
| 1339566 | N/A | N/A | 28517 | 28536 | CTCGCTTTACCCTCCCAACA | 35 | 1252 |
| 1339579 | N/A | N/A | 30068 | 30087 | CCATCTCCTTCTGCCTGTTA | 42 | 1253 |
| 1339588 | N/A | N/A | 93252 | 93271 | TGCCGTCCTCCACATCCACA | 24 | 1254 |
| 1339644 | N/A | N/A | 45587 | 45606 | CTTCTATCTCACACCCGTCA | 34 | 1255 |

TABLE 17
Reduction of KCNT1 RNA by 4,000 nM 5-10-5 MOE gapmers with a mixed backbone measured
with human KCNT1 primer probe set RTS39496

| | SEQ | SEQ | SEQ | SEQ | | | |
|---|---|---|---|---|---|---|---|
| | ID | ID | ID | ID | | | |
| | NO: 1 | NO: 1 | NO: 2 | NO: 2 | | KCNT1 | SEQ |
| Compound | Start | Stop | Start | Stop | | (% | ID |
| Number | Site | Site | Site | Site | Sequence (5′ to 3′) | UTC) | No. |
| 1080855 | 3854 | 3873 | 94233 | 94252 | GTCACGCTAGTGCCACCGTG | 29 | 283 |
| 1337254 | N/A | N/A | 19579 | 19598 | GGCAGAAGCCCCCAACTCAC | 48 | 1256 |
| 1337263 | N/A | N/A | 56789 | 56808 | AAAGCTTCTCCTCTCTGGAC | 45 | 1257 |
| 1337275 | N/A | N/A | 51275 | 51294 | CGTGGCTCACCTACCGTGGC | 68 | 1258 |
| 1337285 | N/A | N/A | 93251 | 93270 | GCCGTCCTCCACATCCACAC | 19 | 1259 |
| 1337317 | N/A | N/A | 67897 | 67916 | GGACAGTCCACCTAGATGGT | 34 | 1260 |
| 1337344 | N/A | N/A | 39980 | 39999 | CCCACGCCAGCATCCAGGAA | 55 | 1261 |
| 1337372 | N/A | N/A | 18345 | 18364 | AGCAAAAGCCTCTGCTGTCC | 57 | 1262 |
| 1337398 | N/A | N/A | 48585 | 48604 | CTGGCAAGACCACGAAGCCA | 71 | 1263 |
| 1337447 | N/A | N/A | 64826 | 64845 | GTTCCGTGAATTTCCCTGAA | 18 | 1264 |
| 1337485 | N/A | N/A | 34528 | 34547 | GGAGAGCCCACACGCCATAC | 50 | 1265 |
| 1337540 | N/A | N/A | 86667 | 86686 | GCAGGTGCCCATCCACCCAC | 68 | 1266 |
| 1337560 | N/A | N/A | 79198 | 79217 | CCACAGCCCTTTCACGGCCT | 77 | 1267 |
| 1337589 | N/A | N/A | 65776 | 65795 | CTAAAAGTCCTATCTGCCCA | 26 | 1268 |
| 1337602 | N/A | N/A | 47623 | 47642 | TGAGATAGAAACAATGGCCT | 34 | 1269 |
| 1337625 | 3976 | 3995 | 94355 | 94374 | AAAAAACTCTCCTCACTAGC | 33 | 1270 |
| 1337693 | N/A | N/A | 17993 | 18012 | AAACTCTTCACCTGGGCATT | 28 | 1271 |
| 1337712 | N/A | N/A | 32489 | 32508 | TCCAGCGACTCTGAACCTCT | 37 | 1272 |
| 1337753 | N/A | N/A | 32175 | 32194 | GGCTGCAATTCAACACTGCC | 40 | 1273 |
| 1337791 | N/A | N/A | 40470 | 40489 | CACACCTGCCTCTCGGCTCT | 54 | 1274 |
| 1337845 | N/A | N/A | 93625 | 93644 | CAGGGCCCATCCCTGACCGA | 38 | 1275 |
| 1337880 | N/A | N/A | 85812 | 85831 | CCAGCTCTATCTTCCCAGAC | 35 | 1276 |
| 1337899 | N/A | N/A | 54078 | 54097 | GCCTGAGCACTCTTACGCAT | 9 | 1277 |
| 1337910 | N/A | N/A | 68217 | 68236 | AACAGTCCATCCCAGATGAC | 51 | 1278 |
| 1337934 | N/A | N/A | 26990 | 27009 | GCTTCCACCAAGATTACCCT | 29 | 1279 |
| 1337959 | N/A | N/A | 46331 | 46350 | TCATGGTGCCCACCCCCACA | 71 | 1280 |
| 1337965 | N/A | N/A | 41854 | 41873 | ACACAGCCCCACCCCTGCGG | 54 | 1281 |
| 1337998 | N/A | N/A | 90301 | 90320 | GAGGCCTTGCCCAACAGGGC | 72 | 1282 |
| 1338030 | N/A | N/A | 49008 | 49027 | CCCACTCTACCCTCTGGCAT | 77 | 1283 |
| 1338063* | N/A | N/A | 52674 | 52693 | AGGCCACTCCACTTCTTGGA | 47 | 1284 |
| 1338064 | N/A | N/A | 71771 | 71790 | GTGGACCTCAACCCCCTACT | 38 | 1285 |
| 1338101 | N/A | N/A | 28514 | 28533 | GCTTTACCCTCCCAACAGGT | 44 | 1286 |
| 1338134 | N/A | N/A | 82506 | 82525 | AACTGACTCCAGGATCCCTA | 33 | 1287 |
| 1338143 | N/A | N/A | 22908 | 22927 | TTCAAAGCTCCAGCTACACC | 44 | 1288 |
| 1338196 | 4721 | 4740 | 95100 | 95119 | TTAATAGAAGTTTCCAGCGC | 31 | 1289 |
| 1338318 | N/A | N/A | 69374 | 69393 | GCAGGGAACCCCACCACATC | 72 | 1290 |
| 1338350 | N/A | N/A | 92130 | 92149 | GGCCACCAGCTCATTTCACT | 33 | 1291 |
| 1338463 | N/A | N/A | 75166 | 75185 | AGCACACCCCATCTCAGTGA | 45 | 1292 |
| 1338468 | N/A | N/A | 77142 | 77161 | CGTTCTTCCCTTAACCACCT | 31 | 1293 |
| 1338481 | N/A | N/A | 42856 | 42875 | TCCGCAGCATCCAAACCCAC | 34 | 1294 |
| 1338489 | N/A | N/A | 31055 | 31074 | GCCTTAGTCCTATTGAATTA | 64 | 1295 |
| 1338499 | N/A | N/A | 50391 | 50410 | TCGATGTTTCCCAAAGCTCA | 47 | 1296 |
| 1338504 | N/A | N/A | 55398 | 55417 | CCCCAAGCCACCTGGAACCA | 12 | 1297 |
| 1338548 | N/A | N/A | 23466 | 23485 | GGCCATTTCTCAGGCTGGCC | 66 | 1298 |
| 1338592 | N/A | N/A | 91605 | 91624 | CCCGCCTGAATCCCCCACGC | 41 | 1299 |
| 1338674 | N/A | N/A | 68632 | 68651 | GACAATCCACCCCAGAGGGT | 49 | 1300 |
| 1338705 | N/A | N/A | 37184 | 37203 | GGTCTGAGCACACGCTCCTA | 29 | 1301 |
| 1338730 | N/A | N/A | 75977 | 75996 | CTCGGTCTTTCTCCTCCCAC | 33 | 1302 |
| 1338748 | N/A | N/A | 89245 | 89264 | ACTTCCCACCACAAGGCGCA | 43 | 1303 |
| 1338897 | N/A | N/A | 78077 | 78096 | TCCAAGTAAACATCGCCAGT | 59 | 1304 |
| 1339016 | N/A | N/A | 58716 | 58735 | AGGACAGTCTTAGCCACCAA | 28 | 1305 |
| 1339039 | N/A | N/A | 25349 | 25368 | GATGGACGATATCTCCTGGA | 22 | 1306 |
| 1339053 | N/A | N/A | 35847 | 35866 | TATGACACCCATTCTGGACA | 63 | 1307 |
| 1339059 | N/A | N/A | 81746 | 81765 | TTGGCCTCCAGATACGGCCA | 120 | 1308 |
| 1339088 | N/A | N/A | 44395 | 44414 | GAGAGGGCCACCCTTCAGCC | 54 | 1309 |
| 1339158 | N/A | N/A | 33536 | 33555 | ACCACAGCCACCTCAAAGAT | 106 | 1310 |
| 1339198 | N/A | N/A | 45586 | 45605 | TTCTATCTCACACCCGTCAC | 66 | 1311 |
| 1339200 | N/A | N/A | 38102 | 38121 | CTCACCCCCCAATTCCTACC | 70 | 1312 |
| 1339205 | N/A | N/A | 70733 | 70752 | AGGTCTCTTCCCTCAGGGAC | 70 | 1313 |
| 1339244 | N/A | N/A | 29998 | 30017 | TGTGCATAACACAAATATTG | 58 | 1314 |
| 1339275 | N/A | N/A | 20957 | 20976 | AGTGAGCTCCCAACTCTGTC | 41 | 1315 |
| 1339318 | N/A | N/A | 87559 | 87578 | GGTGTCCAAACTCACAGGCT | 13 | 1316 |
| 1339325 | N/A | N/A | 84987 | 85006 | TCACAGGTAAAAGACACGAC | 71 | 1317 |
| 1339393 | N/A | N/A | 73446 | 73465 | GAGCAATGCCCACAAAGGTG | 39 | 1318 |
| 1339404 | 4425 | 4444 | 94804 | 94823 | GTCTTCTGCTTCCTTCAGAA | 28 | 1319 |
| 1339405 | N/A | N/A | 83567 | 83586 | TAAATTGGCATTAATGTCTT | 90 | 1320 |
| 1339414 | N/A | N/A | 62788 | 62807 | CGCACGGCCCCATCTGAACT | 28 | 1321 |
| 1339430 | N/A | N/A | 20350 | 20369 | GGGCTCAGCCCTTTCAGACC | 50 | 1322 |
| 1339434 | N/A | N/A | 61913 | 61932 | GGCACCCTCCCTCTACTGGC | 33 | 1323 |
| 1339436 | N/A | N/A | 27583 | 27602 | GTGCCCAAAACTACAGCGGT | 20 | 1324 |
| 1339456 | N/A | N/A | 60121 | 60140 | CCACGGCCACACCTGTGTCT | 23 | 1325 |
| 1339488 | N/A | N/A | 24451 | 24470 | AACCTGAAGCCCAAACGGTT | 70 | 1326 |
| 1339533 | N/A | N/A | 57933 | 57952 | GTCACCTGTTTTACTGAGCC | 34 | 1327 |
| 1339609 | N/A | N/A | 17365 | 17384 | GGGTGTTTACCCAAGACAGC | 22 | 1328 |
| 1339624 | N/A | N/A | 31514 | 31533 | GTCTGCGCACAGCTGAGCTT | 34 | 1329 |
| 1339639 | N/A | N/A | 56319 | 56338 | CACAATTCTCAAACTGCTCC | 14 | 1330 |
| 1339649 | N/A | N/A | 18869 | 18888 | CCGAAGCTCTAATCCCTGGC | 32 | 1331 |
| 1339660 | N/A | N/A | 21948 | 21967 | GTTGCTCAACTCCAGAGAAC | 44 | 1332 |

TABLE 18
Reduction of KCNT1 RNA by 4,000 nM 5-10-5 MOE gapmers with a mixed backbone measured
with human KCNT1 primer probe set RTS39496

| | SEQ | SEQ | SEQ | SEQ | | | |
|---|---|---|---|---|---|---|---|
| | ID | ID | ID | ID | | | |
| | NO: 1 | NO: 1 | NO: 2 | NO: 2 | | KCNT1 | SEQ |
| Compound | Start | Stop | Start | Stop | | (% | ID |
| Number | Site | Site | Site | Site | Sequence (5′ to 3′) | UTC) | No. |
| 1080855 | 3854 | 3873 | 94233 | 94252 | GTCACGCTAGTGCCACCGTG | 15 | 283 |
| 1080891 | 4702 | 4721 | 95081 | 95100 | CTGACCGTACAAACCAGTAA | 18 | 289 |
| 1337256 | N/A | N/A | 48584 | 48603 | TGGCAAGACCACGAAGCCAA | 99 | 1333 |
| 1337339 | N/A | N/A | 50382 | 50401 | CCCAAAGCTCACAACACTCA | 66 | 1334 |
| 1337353 | N/A | N/A | 51274 | 51293 | GTGGCTCACCTACCGTGGCC | 95 | 1335 |
| 1337366 | N/A | N/A | 78024 | 78043 | GGCTGGCCCCACATGCAGGC | 58 | 1336 |
| 1337404 | N/A | N/A | 83424 | 83443 | CCCTGGTGCCTTCTACAGGC | 52 | 1337 |
| 1337537 | N/A | N/A | 32487 | 32506 | CAGCGACTCTGAACCTCTGC | 30 | 1338 |
| 1337547 | N/A | N/A | 28513 | 28532 | CTTTACCCTCCCAACAGGTT | 62 | 1339 |
| 1337554 | N/A | N/A | 82500 | 82519 | CTCCAGGATCCCTATGGGCT | 31 | 1340 |
| 1337588 | N/A | N/A | 79156 | 79175 | AGGCACCACCAGATGCCACA | 78 | 1341 |
| 1337604 | N/A | N/A | 75975 | 75994 | CGGTCTTTCTCCTCCCACCA | 36 | 1342 |
| 1337619 | 3975 | 3994 | 94354 | 94373 | AAAAACTCTCCTCACTAGCC | 28 | 1343 |
| 1337669 | N/A | N/A | 20349 | 20368 | GGCTCAGCCCTTTCAGACCT | 56 | 1344 |
| 1337742 | N/A | N/A | 55336 | 55355 | TGTCCCAGACCATCATCGAT | 23 | 1345 |
| 1337748 | 4368 | 4387 | 94747 | 94766 | ACGCACCCCTCTCACATGCC | 24 | 1346 |
| 1337793* | N/A | N/A | 52607 | 52626 | GGGAAACCCCCCAAGTCCTC | 39 | 1347 |
| 1337824 | N/A | N/A | 38101 | 38120 | TCACCCCCCAATTCCTACCT | 67 | 1348 |
| 1337881 | N/A | N/A | 71770 | 71789 | TGGACCTCAACCCCCTACTT | 52 | 1349 |
| 1337888 | N/A | N/A | 91604 | 91623 | CCGCCTGAATCCCCCACGCC | 59 | 1350 |
| 1337903 | N/A | N/A | 87558 | 87577 | GTGTCCAAACTCACAGGCTA | 19 | 1351 |
| 1337950 | N/A | N/A | 29997 | 30016 | GTGCATAACACAAATATTGC | 18 | 1352 |
| 1337958 | N/A | N/A | 26984 | 27003 | ACCAAGATTACCCTCAGGAT | 27 | 1353 |
| 1338007 | N/A | N/A | 75165 | 75184 | GCACACCCCATCTCAGTGAC | 28 | 1354 |
| 1338009 | N/A | N/A | 35846 | 35865 | ATGACACCCATTCTGGACAT | 50 | 1355 |
| 1338029 | N/A | N/A | 61912 | 61931 | GCACCCTCCCTCTACTGGCA | 21 | 1356 |
| 1338098 | N/A | N/A | 18335 | 18354 | TCTGCTGTCCACTCCTGAAC | 99 | 1357 |
| 1338142 | N/A | N/A | 32174 | 32193 | GCTGCAATTCAACACTGCCT | 54 | 1358 |
| 1338154 | N/A | N/A | 39904 | 39923 | CGGAGGCTGCCCATTAGCTG | 99 | 1359 |
| 1338220 | N/A | N/A | 41785 | 41804 | AAACAGGTGCATTCTAGGGT | 41 | 1360 |
| 1338250 | N/A | N/A | 64779 | 64798 | ACCTGGTGCACCTGGAGTCA | 25 | 1361 |
| 1338265 | N/A | N/A | 44338 | 44357 | GCCCTGCTCAGCACGAAGCC | 53 | 1362 |
| 1338325 | N/A | N/A | 93154 | 93173 | TGGACAGGCCATTCCCACTC | 34 | 1363 |
| 1338357 | N/A | N/A | 34523 | 34542 | GCCCACACGCCATACAGTTA | 61 | 1364 |
| 1338393 | N/A | N/A | 56290 | 56309 | GGACATTCCCAGCATTGACC | 22 | 1365 |
| 1338415 | N/A | N/A | 18868 | 18887 | CGAAGCTCTAATCCCTGGCC | 43 | 1366 |
| 1338507 | N/A | N/A | 84986 | 85005 | CACAGGTAAAAGACACGACA | 61 | 1367 |
| 1338513 | N/A | N/A | 23450 | 23469 | GGCCGTGTCCTCCCAAGCCT | 27 | 1368 |
| 1338516 | N/A | N/A | 58711 | 58730 | AGTCTTAGCCACCAAGGCCT | 56 | 1369 |
| 1338528 | N/A | N/A | 59994 | 60013 | GGACGGGTCCCCATCTTGCC | 70 | 1370 |
| 1338557 | N/A | N/A | 17363 | 17382 | GTGTTTACCCAAGACAGCTA | 34 | 1371 |
| 1338680 | N/A | N/A | 69373 | 69392 | CAGGGAACCCCACCACATCA | 41 | 1372 |
| 1338710 | N/A | N/A | 45577 | 45596 | ACACCCGTCACCCTCTGCAC | 64 | 1373 |
| 1338727 | N/A | N/A | 47599 | 47618 | GTCCCAGGCTTCTCTTGGGA | 61 | 1374 |
| 1338731 | N/A | N/A | 24384 | 24403 | GTGTTCTGTTTTACACTAAT | 10 | 1375 |
| 1338756 | N/A | N/A | 40431 | 40450 | GTGAGATCCACACTCCAGAA | 36 | 1376 |
| 1338761 | N/A | N/A | 27582 | 27601 | TGCCCAAAACTACAGCGGTC | 25 | 1377 |
| 1338769 | N/A | N/A | 90160 | 90179 | CGCCAGGGCAGAATTACCTT | 29 | 1378 |
| 1338811 | N/A | N/A | 73444 | 73463 | GCAATGCCCACAAAGGTGGC | 65 | 1379 |
| 1338815 | N/A | N/A | 19578 | 19597 | GCAGAAGCCCCCAACTCACT | 46 | 1380 |
| 1338899 | N/A | N/A | 22907 | 22926 | TCAAAGCTCCAGCTACACCT | 49 | 1381 |
| 1338900 | N/A | N/A | 21947 | 21966 | TTGCTCAACTCCAGAGAACC | 53 | 1382 |
| 1338908 | N/A | N/A | 31009 | 31028 | CCTTAATTACCTCTAAAGAA | 55 | 1383 |
| 1338938 | N/A | N/A | 81680 | 81699 | TCCCAGTGCCTCACACGCGG | 49 | 1384 |
| 1338959 | N/A | N/A | 85811 | 85830 | CAGCTCTATCTTCCCAGACA | 51 | 1385 |
| 1338982 | N/A | N/A | 56788 | 56807 | AAGCTTCTCCTCTCTGGACA | 33 | 1386 |
| 1339005 | N/A | N/A | 57932 | 57951 | TCACCTGTTTTACTGAGCCT | 6 | 1387 |
| 1339029 | N/A | N/A | 92129 | 92148 | GCCACCAGCTCATTTCACTC | 24 | 1388 |
| 1339052 | N/A | N/A | 49007 | 49026 | CCACTCTACCCTCTGGCATC | 58 | 1389 |
| 1339120 | N/A | N/A | 17965 | 17984 | GGTGGGCTCATTATTAGAGC | 32 | 1390 |
| 1339150 | N/A | N/A | 42853 | 42872 | GCAGCATCCAAACCCACGGT | 39 | 1391 |
| 1339161 | N/A | N/A | 46246 | 46265 | CAACAGTTCTCCCTGCTGAC | 63 | 1392 |
| 1339187 | N/A | N/A | 86662 | 86681 | TGCCCATCCACCCACTTGGA | 70 | 1393 |
| 1339208 | N/A | N/A | 68619 | 68638 | AGAGGGTCCACCCCAGACAG | 28 | 1394 |
| 1339215 | 1415 | 1434 | 70613 | 70632 | AGCAGGCCTCCCCATTGTCC | 29 | 1395 |
| 1339251 | N/A | N/A | 65765 | 65784 | ATCTGCCCAGAACCTCGCCA | 19 | 1396 |
| 1339267 | N/A | N/A | 31486 | 31505 | GCAGAGGGTCCCATGAGGCT | 26 | 1397 |
| 1339343 | N/A | N/A | 54077 | 54096 | CCTGAGCACTCTTACGCATA | 20 | 1398 |
| 1339368 | N/A | N/A | 89082 | 89101 | CCCCAAAGTCTCCCCCCTAC | 50 | 1399 |
| 1339375 | N/A | N/A | 33534 | 33553 | CACAGCCACCTCAAAGATGA | 72 | 1400 |
| 1339403 | N/A | N/A | 25322 | 25341 | GCAGGACAATTTCTAGGTAC | 29 | 1401 |
| 1339498 | N/A | N/A | 77137 | 77156 | TTCCCTTAACCACCTGTGCA | 79 | 1402 |
| 1339507 | N/A | N/A | 67895 | 67914 | ACAGTCCACCTAGATGGTCC | 21 | 1403 |
| 1339527 | N/A | N/A | 93614 | 93633 | CCTGACCGACACCTGTCCCA | 32 | 1404 |
| 1339537 | N/A | N/A | 62787 | 62806 | GCACGGCCCCATCTGAACTC | 18 | 1405 |
| 1339541 | N/A | N/A | 68214 | 68233 | AGTCCATCCCAGATGACCCA | 44 | 1406 |
| 1339659 | N/A | N/A | 20956 | 20975 | GTGAGCTCCCAACTCTGTCC | 30 | 1407 |
| 1339664 | N/A | N/A | 37179 | 37198 | GAGCACACGCTCCTATGCAT | 63 | 1408 |

TABLE 19
Reduction of KCNT1 RNA by 4,000 nM 5-10-5 MOE gapmers with a mixed backbone measured
with human KCNT1 primer probe set RTS39496

| | SEQ | SEQ | SEQ | SEQ | | | |
|---|---|---|---|---|---|---|---|
| | ID | ID | ID | ID | | | |
| | NO: 1 | NO: 1 | NO: 2 | NO: 2 | | KCNT1 | SEQ |
| Compound | Start | Stop | Start | Stop | | (% | ID |
| Number | Site | Site | Site | Site | Sequence (5′ to 3′) | UTC) | No. |
| 1080855 | 3854 | 3873 | 94233 | 94252 | GTCACGCTAGTGCCACCGTG | 31 | 283 |
| 1080888 | 4698 | 4717 | 95077 | 95096 | CCGTACAAACCAGTAAGGAA | 31 | 55 |
| 1337224 | N/A | N/A | 73379 | 73398 | CAGAGAGACTCCACCTGTCC | 72 | 1409 |
| 1337241 | N/A | N/A | 44316 | 44335 | CCCAGGCCCCATGTGTGGTC | 33 | 1410 |
| 1337261 | N/A | N/A | 75959 | 75978 | ACCACAGCCTAGACCAGGCT | 35 | 1411 |
| 1337278 | N/A | N/A | 68178 | 68197 | CTGGACAGTTCACCCCAGAT | 23 | 1412 |
| 1337320 | N/A | N/A | 64141 | 64160 | GTCTTACTTCTTAATGGAGA | 10 | 1413 |
| 1337361 | N/A | N/A | 65622 | 65641 | GGCTGAGGTTTCTACAGCCA | 59 | 1414 |
| 1337362 | N/A | N/A | 50378 | 50397 | AAGCTCACAACACTCAGGGT | 36 | 1415 |
| 1337368 | N/A | N/A | 29984 | 30003 | ATATTGCCATTTTAACCCTC | 36 | 1416 |
| 1337370 | N/A | N/A | 78006 | 78025 | GCAGAGTCCCACCACCAAGA | 63 | 1417 |
| 1337397 | N/A | N/A | 93149 | 93168 | AGGCCATTCCCACTCGCTGT | 32 | 1418 |
| 1337443 | N/A | N/A | 86660 | 86679 | CCCATCCACCCACTTGGACA | 88 | 1419 |
| 1337454 | N/A | N/A | 20945 | 20964 | ACTCTGTCCACTTCCTCCAC | 39 | 1420 |
| 1337466 | N/A | N/A | 19542 | 19561 | GAAAGTTGCCCACTCCTGTA | 63 | 1421 |
| 1337469 | N/A | N/A | 84930 | 84949 | GGGTTCGCCCTTACTCATCA | 33 | 1422 |
| 1337478 | N/A | N/A | 24379 | 24398 | CTGTTTTACACTAATGCGGG | 68 | 1423 |
| 1337548 | 4366 | 4385 | 94745 | 94764 | GCACCCCTCTCACATGCCCG | 46 | 1424 |
| 1337574 | 3973 | 3992 | 94352 | 94371 | AAACTCTCCTCACTAGCCTG | 28 | 1425 |
| 1337597 | N/A | N/A | 75151 | 75170 | AGTGACACTCAAAAGTGCTC | 43 | 1426 |
| 1337610 | N/A | N/A | 55302 | 55321 | CCAAGGAGACCTCACTGCTC | 29 | 1427 |
| 1337639 | N/A | N/A | 58690 | 58709 | TGGCTGACCCCCGCCAGGGC | 34 | 1428 |
| 1337724 | N/A | N/A | 51141 | 51160 | GATGCGGGCCAGGCTAGGCC | 21 | 1429 |
| 1337746 | N/A | N/A | 18851 | 18870 | GCCACTCTCCCTCCAATAGA | 43 | 1430 |
| 1337747 | N/A | N/A | 68605 | 68624 | AGACAGTCCACCCTGGATGA | 45 | 1431 |
| 1337756 | N/A | N/A | 85807 | 85826 | TCTATCTTCCCAGACACACT | 66 | 1432 |
| 1337759 | N/A | N/A | 46174 | 46193 | TAGTCATACACAGATGGCCA | 73 | 1433 |
| 1337788 | N/A | N/A | 59991 | 60010 | CGGGTCCCCATCTTGCCTAC | 57 | 1434 |
| 1337836 | N/A | N/A | 38019 | 38038 | GCACCGGGCACAGATCCCAC | 35 | 1435 |
| 1337857 | N/A | N/A | 56703 | 56722 | CCGGGCTCCCATGAATGTCC | 33 | 1436 |
| 1337902 | N/A | N/A | 30947 | 30966 | GGGCTTTGATATATAAATCT | 42 | 1437 |
| 1337935 | N/A | N/A | 41399 | 41418 | GCCAAGGAACATCAGGGCGA | 55 | 1438 |
| 1337943 | N/A | N/A | 82467 | 82486 | TGGCCGGAACACACTTTCAC | 59 | 1439 |
| 1338037 | 1413 | 1432 | 70611 | 70630 | CAGGCCTCCCCATTGTCCAT | 45 | 1440 |
| 1338119 | N/A | N/A | 22825 | 22844 | GCCCTAGCTTCCCCAGAGCA | 27 | 1441 |
| 1338123 | N/A | N/A | 26982 | 27001 | CAAGATTACCCTCAGGATCA | 52 | 1442 |
| 1338238 | N/A | N/A | 35744 | 35763 | GTCTGAGACCCATCTGGGTC | 74 | 1443 |
| 1338267 | N/A | N/A | 42771 | 42790 | TCTCTGCCAGCCCTAACTTA | 58 | 1444 |
| 1338272 | N/A | N/A | 37095 | 37114 | AGCACGAGTACCCTCTGCCA | 36 | 1445 |
| 1338307 | N/A | N/A | 33509 | 33528 | AGCTGCTAAAAGAAATGCCA | 26 | 1446 |
| 1338311 | N/A | N/A | 71765 | 71784 | CTCAACCCCCTACTTGGTCT | 57 | 1447 |
| 1338372 | N/A | N/A | 45575 | 45594 | ACCCGTCACCCTCTGCACCA | 40 | 1448 |
| 1338412 | N/A | N/A | 87549 | 87568 | CTCACAGGCTACTCCCCCCA | 35 | 1449 |
| 1338485 | N/A | N/A | 62452 | 62471 | GGTCCCCTCCTTCTCCCATC | 22 | 1450 |
| 1338495 | N/A | N/A | 77110 | 77129 | ACGCTCCTCCAGCTGAGCCT | 53 | 1451 |
| 1338538 | N/A | N/A | 32172 | 32191 | TGCAATTCAACACTGCCTTA | 29 | 1452 |
| 1338564 | N/A | N/A | 54043 | 54062 | TTTGAGGAAATCTACGGGTA | 28 | 1453 |
| 1338583 | N/A | N/A | 91599 | 91618 | TGAATCCCCCACGCCAGGCC | 34 | 1454 |
| 1338609 | N/A | N/A | 79136 | 79155 | GCTGTACCCACAGGCGGCAC | 68 | 1455 |
| 1338632 | N/A | N/A | 47565 | 47584 | ACAGGCTCCATTGAGAGGCT | 52 | 1456 |
| 1338637 | N/A | N/A | 23309 | 23328 | ATGTTAAATATAACCACCCC | 70 | 1457 |
| 1338645 | N/A | N/A | 93542 | 93561 | CCCGCACCCACCTCTGGTGC | 75 | 1458 |
| 1338719 | N/A | N/A | 56054 | 56073 | TGGAGTGGAGACTCATCCCA | 18 | 1459 |
| | N/A | N/A | 56118 | 56137 | | | |
| 1338813 | N/A | N/A | 17945 | 17964 | ACTGAGTTCAACAAGATGAA | 28 | 1460 |
| 1338860* | N/A | N/A | 52340 | 52359 | GCCCCACTCACCATGCAGAC | 47 | 1461 |
| 1338862 | N/A | N/A | 27568 | 27587 | GCGGTCTCTTCTCTCTGTTC | 23 | 1462 |
| 1338913 | N/A | N/A | 17281 | 17300 | GATGAATTATTCCCATGGGC | 31 | 1463 |
| 1338924 | N/A | N/A | 57904 | 57923 | CCTTGGCATTCACTGAGCCT | 19 | 1464 |
| 1338984 | N/A | N/A | 25293 | 25312 | TCCTGACACCCCACCAACGC | 85 | 1465 |
| 1339015 | N/A | N/A | 18333 | 18352 | TGCTGTCCACTCCTGAACAC | 83 | 1466 |
| 1339021 | N/A | N/A | 89016 | 89035 | GTCTTGTTCTCTGCGAGAAC | 13 | 1467 |
| 1339066 | 1068 | 1087 | 61818 | 61837 | GCCACGCAGATCATGATGAC | 54 | 1468 |
| 1339087 | N/A | N/A | 39852 | 39871 | CTCAACCGCCTCTTCTGCAA | 86 | 1469 |
| 1339095 | N/A | N/A | 20260 | 20279 | CACACGGCTCCTGTGAGTCA | 31 | 1470 |
| 1339169 | N/A | N/A | 31410 | 31429 | CCCAGGCTCATTCCCGCCAT | 50 | 1471 |
| 1339179 | N/A | N/A | 48970 | 48989 | CGAGGCAGAATTCTCCATTC | 34 | 1472 |
| 1339206 | N/A | N/A | 83413 | 83432 | TCTACAGGCTCCTTGCATGC | 47 | 1473 |
| 1339271 | N/A | N/A | 69371 | 69390 | GGGAACCCCACCACATCACT | 56 | 1474 |
| 1339413 | N/A | N/A | 21945 | 21964 | GCTCAACTCCAGAGAACCAA | 49 | 1475 |
| 1339432 | N/A | N/A | 92126 | 92145 | ACCAGCTCATTTCACTCCGG | 21 | 1476 |
| 1339500 | N/A | N/A | 28502 | 28521 | CAACAGGTTCTACCTACCAA | 93 | 1477 |
| 1339509 | N/A | N/A | 32484 | 32503 | CGACTCTGAACCTCTGCCTC | 70 | 1478 |
| 1339553 | N/A | N/A | 90156 | 90175 | AGGGCAGAATTACCTTGCAA | 33 | 1479 |
| 1339560 | N/A | N/A | 40425 | 40444 | TCCACACTCCAGAAGAACAA | 49 | 1480 |
| 1339565 | N/A | N/A | 67852 | 67871 | TCTCATGGCTCTCATTGGCC | 41 | 1481 |
| 1339575 | N/A | N/A | 34509 | 34528 | CAGTTATGACTCAATGAGCC | 48 | 1482 |
| 1339618 | N/A | N/A | 81636 | 81655 | TCCTGGTTCCACCATCAAGA | 63 | 1483 |
| 1339622 | N/A | N/A | 48514 | 48533 | GCAACCCTGCCCATTGCCAG | 70 | 1484 |

TABLE 20
Reduction of KCNT1 RNA by 4,000 nM 5-10-5 MOE gapmers with a mixed backbone measured
with human KCNT1 primer probe set RTS39496

| | SEQ | SEQ | SEQ | SEQ | | | |
|---|---|---|---|---|---|---|---|
| | ID | ID | ID | ID | | | |
| | NO: 1 | NO: 1 | NO: 2 | NO: 2 | | KCNT1 | SEQ |
| Compound | Start | Stop | Start | Stop | | (% | ID |
| Number | Site | Site | Site | Site | Sequence (5′ to 3′) | UTC) | No. |
| 1080855 | 3854 | 3873 | 94233 | 94252 | GTCACGCTAGTGCCACCGTG | 18 | 283 |
| 1337222 | N/A | N/A | 19455 | 19474 | GGGCTGGACACCAGCCGACC | 65 | 1485 |
| 1337239 | N/A | N/A | 48943 | 48962 | CACCAGGCCAACCATCCCCC | 57 | 1486 |
| 1337318 | N/A | N/A | 85691 | 85710 | CTTGCCATCCCGAAATTCCA | 33 | 1487 |
| 1337348 | N/A | N/A | 29976 | 29995 | ATTTTAACCCTCTTTGCCGC | 58 | 1488 |
| 1337452 | N/A | N/A | 64019 | 64038 | TGCACATCCCGATTTGGCCC | 36 | 1489 |
| 1337457 | N/A | N/A | 84790 | 84809 | GTGATTTGCATCCAGAATTC | 47 | 1490 |
| 1337517 | N/A | N/A | 71575 | 71594 | TGGTCCCTGCCCATAGAGGT | 36 | 1491 |
| 1337538 | N/A | N/A | 18845 | 18864 | CTCCCTCCAATAGAACCTCA | 36 | 1492 |
| 1337649 | N/A | N/A | 90107 | 90126 | CACTGGCTGTTAAATTTGCT | 18 | 1493 |
| 1337668 | N/A | N/A | 20940 | 20959 | GTCCACTTCCTCCACCGGGC | 23 | 1494 |
| 1337680 | N/A | N/A | 83316 | 83335 | GTCTCTGTATATGCCTGGCC | 65 | 1495 |
| 1337690 | N/A | N/A | 32086 | 32105 | GCACAGCTCCCATGGATGAA | 19 | 1496 |
| 1337697 | N/A | N/A | 56025 | 56044 | GGTCCCAGGCCTCTGAGCGC | 10 | 1497 |
| | | | 56089 | 56108 | | | |
| | | | 56153 | 56172 | | | |
| 1337700 | N/A | N/A | 76996 | 77015 | GGTGCCGAACCTTAAGGACC | 41 | 1498 |
| 1337725 | N/A | N/A | 27518 | 27537 | GCAGGTCCACCCTCCCCCGC | 25 | 1499 |
| 1337771 | N/A | N/A | 37927 | 37946 | TAACCGTTCCCTTCCATGTC | 41 | 1500 |
| 1337777 | N/A | N/A | 55294 | 55313 | ACCTCACTGCTCACAAGGCC | 18 | 1501 |
| 1337784* | N/A | N/A | 52238 | 52257 | GCCTTCGCCATCGCCAGGCT | 14 | 1502 |
| 1337795 | N/A | N/A | 86406 | 86425 | GGGCTCGCCACCCCTCATGC | 43 | 1503 |
| 1337855 | N/A | N/A | 21896 | 21915 | GCTAATGAAACAGCCTGGTC | 43 | 1504 |
| 1337978 | N/A | N/A | 78952 | 78971 | CTTGGTTTCCAATCATCATT | 36 | 1505 |
| 1337981 | N/A | N/A | 32439 | 32458 | TTGGCTCACCCAGATCATCC | 31 | 1506 |
| 1337992 | N/A | N/A | 58649 | 58668 | AACCATGGTCCTCCTGGGCC | 38 | 1507 |
| 1337997 | N/A | N/A | 17841 | 17860 | CTCTTGGTTCACACAACCAA | 17 | 1508 |
| 1338015 | N/A | N/A | 67431 | 67450 | GGGCTGCCACCCTCACTGAA | 51 | 1509 |
| 1338071 | N/A | N/A | 62366 | 62385 | GCCCAAGCACTTCACACCCT | 26 | 1510 |
| 1338078 | N/A | N/A | 68133 | 68152 | GATGGTCCACACTAAATGGT | 48 | 1511 |
| 1338085 | N/A | N/A | 69098 | 69117 | CACTATGCCACTAAGGACAC | 60 | 1512 |
| 1338088 | N/A | N/A | 33378 | 33397 | AGGTAAGCATTTAAACCTTG | 34 | 1513 |
| 1338109 | N/A | N/A | 37048 | 37067 | ATGGAAGCCCCCTTCAACCC | 324 | 1514 |
| 1338189 | N/A | N/A | 24230 | 24249 | TCTCAGGGTCTCCCTGGATA | 50 | 1515 |
| 1338200 | N/A | N/A | 28397 | 28416 | AGCTCAGGCCACCCAAGACT | 43 | 1516 |
| 1338204 | N/A | N/A | 31389 | 31408 | TGCGGAATCCCCTCCTGCAC | 47 | 1517 |
| 1338283 | N/A | N/A | 93415 | 93434 | TCTGTTCACCTCACATGCAT | 45 | 1518 |
| 1338301 | N/A | N/A | 20129 | 20148 | GGGATGGCTTCTAATGGCAG | 24 | 1519 |
| 1338308 | N/A | N/A | 26886 | 26905 | CAGGGTCATCCTCGAAGCCA | 25 | 1520 |
| 1338332 | N/A | N/A | 77995 | 78014 | CCACCAAGAAACATCGCAGA | 52 | 1521 |
| 1338351 | N/A | N/A | 91344 | 91363 | GCTCCGCTTGAATCTAAACA | 15 | 1522 |
| 1338402 | N/A | N/A | 73267 | 73286 | GTCTCCCGCCCTGCCTGGTC | 21 | 1523 |
| 1338467 | N/A | N/A | 17257 | 17276 | CCTGTTGGTCCTTAACTGAA | 30 | 1524 |
| 1338474 | N/A | N/A | 34425 | 34444 | ACCAGCACAGCAAAGGCACA | 36 | 1525 |
| 1338520 | N/A | N/A | 82454 | 82473 | CTTTCACTCTCCATCGGGTT | 31 | 1526 |
| 1338536 | N/A | N/A | 88950 | 88969 | GCTGGCCCAACTCTAGCTGA | 26 | 1527 |
| 1338562 | N/A | N/A | 23101 | 23120 | CACCCTTCCCAAACTCAGCT | 45 | 1528 |
| 1338631 | N/A | N/A | 30920 | 30939 | CACAGTTCAATCCCGAACAC | 23 | 1529 |
| 1338639 | N/A | N/A | 75847 | 75866 | GCCTTGGGCTCTTACCCACA | 31 | 1530 |
| 1338683 | N/A | N/A | 47511 | 47530 | GCTCAAACCATCAGGACCCA | 20 | 1531 |
| 1338690 | N/A | N/A | 92120 | 92139 | TCATTTCACTCCGGCAGGCA | 15 | 1532 |
| 1338725 | N/A | N/A | 42691 | 42710 | CTCGCTGTCAACACACGAAC | 38 | 1533 |
| 1338773 | N/A | N/A | 35706 | 35725 | TCTGAAGCCCCAAACTAGCT | 63 | 1534 |
| 1338776 | N/A | N/A | 93094 | 93113 | GCATCAGCCCAGAGCACCCC | 22 | 1535 |
| 1338779 | N/A | N/A | 44272 | 44291 | TGAGCTCCACCTCATGCCGA | 22 | 1536 |
| 1338795 | N/A | N/A | 56670 | 56689 | GGTCGGGCTATCTAACCCAC | 12 | 1537 |
| 1338806 | N/A | N/A | 59651 | 59670 | GGGTTTGTCACACCCTTCAC | 22 | 1538 |
| 1338817 | N/A | N/A | 65553 | 65572 | GCATGGGACAATCTCCCCCA | 19 | 1539 |
| 1338835 | N/A | N/A | 74943 | 74962 | AGGCAGCACTCACTCTACCA | 62 | 1540 |
| 1338840 | N/A | N/A | 50285 | 50304 | TAGAGTCCCAGCACCTGCCT | 32 | 1541 |
| 1338865 | N/A | N/A | 18306 | 18325 | TACAGCATTACAATTTGATC | 23 | 1542 |
| 1338871 | 4363 | 4382 | 94742 | 94761 | CCCCTCTCACATGCCCGGCT | 28 | 1543 |
| 1338895 | N/A | N/A | 68551 | 68570 | ATGGATGGTCCACCCCAGAC | 17 | 1544 |
| 1338914 | N/A | N/A | 51100 | 51119 | AGGAAAACTCCAATGCTGCC | 56 | 1545 |
| 1338918 | N/A | N/A | 61485 | 61504 | TCTGTCCCCAAGCTCTGCCG | 21 | 1546 |
| 1338949 | 3938 | 3957 | 94317 | 94336 | GAGCTGGCCCTCCCCCCGCA | 32 | 1547 |
| 1339004 | N/A | N/A | 57690 | 57709 | GGCCTGGTTTCCCTATTTAC | 26 | 1548 |
| 1339013 | N/A | N/A | 39660 | 39679 | CCTGATGAAACTTCAGCCCT | 41 | 1549 |
| 1339037 | N/A | N/A | 40417 | 40436 | CCAGAAGAACAAACCTACCA | 58 | 1550 |
| 1339129 | N/A | N/A | 45288 | 45307 | CAAAGCCTCTTCCATTTGAC | 68 | 1551 |
| 1339149 | 4695 | 4714 | 95074 | 95093 | TACAAACCAGTAAGGAACCA | 19 | 1552 |
| 1339246 | N/A | N/A | 41167 | 41186 | TGAGCTCCTCAGCATGGGCC | 25 | 1553 |
| | | | 50778 | 50797 | | | |
| 1339278 | N/A | N/A | 53948 | 53967 | CTGGAGACACCATCTTCGGA | 13 | 1554 |
| 1339367 | N/A | N/A | 25089 | 25108 | TCAGCCTTCACTCACACAGT | 40 | 1555 |
| 1339373 | N/A | N/A | 70358 | 70377 | AGTGGGCATCCCCATACTGC | 62 | 1556 |
| 1339397 | N/A | N/A | 22735 | 22754 | GGCTCAGTGCCCTTCAGGGA | 26 | 1557 |
| 1339535 | N/A | N/A | 81460 | 81479 | GCTGCTCACCTTTTCTAGTT | 66 | 1558 |
| 1339544 | N/A | N/A | 87544 | 87563 | AGGCTACTCCCCCCAGGCCT | 41 | 1559 |
| 1339594 | N/A | N/A | 46150 | 46169 | GGGAAGCTCCACACCAGCTC | 42 | 1560 |
| 1339665 | N/A | N/A | 48469 | 48488 | AGTTCCTCCCCAGACACCGT | 34 | 1561 |

TABLE 21
Reduction of KCNT1 RNA by 4,000 nM 5-10-5 MOE gapmers with a
mixed backbone measured with human KCNT1 primer probe set RTS39496

| | SEQ | SEQ | SEQ | SEQ | | | |
|---|---|---|---|---|---|---|---|
| | ID | ID | ID | ID | | | |
| | NO: 1 | NO: 1 | NO: 2 | NO: 2 | | | SEQ |
| Compound | Start | Stop | Start | Stop | | KCNT1 | ID |
| Number | Site | Site | Site | Site | Sequence (5′ to 3′) | (% UTC) | No. |
| 1080855 | 3854 | 3873 | 94233 | 94252 | GTCACGCTAGTGCCACCGTG | 23 | 283 |
| 1337253 | 2743 | 2762 | 80762 | 80781 | CATGTAGTCCTCCTCGGCGC | 28 | 1562 |
| 1337270 | N/A | N/A | 22602 | 22621 | GCAAAGCTCCCTCTGGAGGA | 53 | 1563 |
| 1337295 | N/A | N/A | 32420 | 32439 | CACGATAATTTCCCATCTTC | 27 | 1564 |
| 1337305 | N/A | N/A | 71519 | 71538 | TGACCCTGCCTTCACTGACC | 66 | 1565 |
| 1337384 | N/A | N/A | 20104 | 20123 | GGCATCAGACCCCACCCCAA | 30 | 1566 |
| 1337489 | N/A | N/A | 63575 | 63594 | AAAGCAGGTCCCCCTGCACC | 43 | 1567 |
| 1337511 | N/A | N/A | 39659 | 39678 | CTGATGAAACTTCAGCCCTC | 54 | 1568 |
| 1337533 | 2002 | 2021 | 73015 | 73034 | CGAGAAGGCCCTCTTCTTCC | 49 | 1569 |
| 1337545 | N/A | N/A | 86405 | 86424 | GGCTCGCCACCCCTCATGCA | 37 | 1570 |
| 1337586 | N/A | N/A | 69090 | 69109 | CACTAAGGACACATTCAGGC | 34 | 1571 |
| 1337591 | N/A | N/A | 90106 | 90125 | ACTGGCTGTTAAATTTGCTA | 18 | 1572 |
| 1337611 | N/A | N/A | 37926 | 37945 | AACCGTTCCCTTCCATGTCA | 43 | 1573 |
| 1337638 | N/A | N/A | 87543 | 87562 | GGCTACTCCCCCCAGGCCTC | 25 | 1574 |
| 1337676 | N/A | N/A | 25085 | 25104 | CCTTCACTCACACAGTGGCC | 36 | 1575 |
| 1337707 | N/A | N/A | 83281 | 83300 | GGCATCTGTCCCACATGGAC | 45 | 1576 |
| 1337776 | N/A | N/A | 28339 | 28358 | GGTACGGCCTCATCCAGGTC | 38 | 1577 |
| 1337846 | N/A | N/A | 59649 | 59668 | GTTTGTCACACCCTTCACTT | 38 | 1578 |
| 1337917 | N/A | N/A | 18840 | 18859 | TCCAATAGAACCTCACTGTA | 51 | 1579 |
| 1337984 | N/A | N/A | 31388 | 31407 | GCGGAATCCCCTCCTGCACA | 48 | 1580 |
| 1338036 | N/A | N/A | 56053 | 56072 | GGAGTGGAGACTCATCCCAC | 17 | 1581 |
| | N/A | N/A | 56117 | 56136 | | | |
| 1338073 | N/A | N/A | 27516 | 27535 | AGGTCCACCCTCCCCCGCAA | 41 | 1582 |
| 1338105 | N/A | N/A | 33373 | 33392 | AGCATTTAAACCTTGGTGGA | 26 | 1583 |
| 1338108 | N/A | N/A | 17839 | 17858 | CTTGGTTCACACAACCAAAT | 41 | 1584 |
| 1338147 | N/A | N/A | 56669 | 56688 | GTCGGGCTATCTAACCCACA | 12 | 1585 |
| 1338205 | N/A | N/A | 21895 | 21914 | CTAATGAAACAGCCTGGTCA | 78 | 1586 |
| 1338236 | N/A | N/A | 17256 | 17275 | CTGTTGGTCCTTAACTGAAA | 26 | 1587 |
| 1338242 | N/A | N/A | 62364 | 62383 | CCAAGCACTTCACACCCTGA | 32 | 1588 |
| 1338254 | N/A | N/A | 45287 | 45306 | AAAGCCTCTTCCATTTGACC | 59 | 1589 |
| 1338274 | N/A | N/A | 92110 | 92129 | CCGGCAGGCACAGACTGGCC | 26 | 1590 |
| 1338290 | N/A | N/A | 77994 | 78013 | CACCAAGAAACATCGCAGAC | 70 | 1591 |
| 1338296 | N/A | N/A | 37047 | 37066 | TGGAAGCCCCCTTCAACCCT | 48 | 1592 |
| 1338331 | N/A | N/A | 51004 | 51023 | GCACATGTCCCCCTAAACGG | 55 | 1593 |
| 1338426 | N/A | N/A | 18305 | 18324 | ACAGCATTACAATTTGATCA | 37 | 1594 |
| 1338443 | N/A | N/A | 34417 | 34436 | AGCAAAGGCACAACAAGATC | 83 | 1595 |
| 1338449 | N/A | N/A | 35705 | 35724 | CTGAAGCCCCAAACTAGCTG | 49 | 1596 |
| 1338451 | 4362 | 4381 | 94741 | 94760 | CCCTCTCACATGCCCGGCTT | 27 | 1597 |
| 1338456 | N/A | N/A | 23098 | 23117 | CCTTCCCAAACTCAGCTCCA | 67 | 1598 |
| 1338497 | N/A | N/A | 42690 | 42709 | TCGCTGTCAACACACGAACA | 36 | 1599 |
| 1338506 | N/A | N/A | 40416 | 40435 | CAGAAGAACAAACCTACCAA | 69 | 1600 |
| 1338540 | N/A | N/A | 67276 | 67295 | CTGAGAGGACTCAGGGACTT | 31 | 1601 |
| | N/A | N/A | 67397 | 67416 | | | |
| 1338544 | N/A | N/A | 85690 | 85709 | TTGCCATCCCGAAATTCCAA | 59 | 1602 |
| 1338608 | 3937 | 3956 | 94316 | 94335 | AGCTGGCCCTCCCCCCGCAT | 32 | 1603 |
| 1338622 | N/A | N/A | 48400 | 48419 | CTTTGAGGCCCCTTGACCTC | 65 | 1604 |
| 1338702 | N/A | N/A | 58560 | 58579 | GAGCGGCTATCCCGCTGCCC | 110 | 1605 |
| 1338735 | N/A | N/A | 44244 | 44263 | AGGCTGTCCCCTTGTCTCCA | 40 | 1606 |
| 1338747 | N/A | N/A | 49819 | 49838 | GGCTTGTCACCCCACCGGGC | 55 | 1607 |
| 1338751 | N/A | N/A | 68549 | 68568 | GGATGGTCCACCCCAGACGA | 15 | 1608 |
| 1338792 | N/A | N/A | 46107 | 46126 | GGGCCCACCATAGCCCTGCA | 62 | 1609 |
| 1338816 | N/A | N/A | 76995 | 77014 | GTGCCGAACCTTAAGGACCC | 47 | 1610 |
| 1338843 | N/A | N/A | 57689 | 57708 | GCCTGGTTTCCCTATTTACT | 13 | 1611 |
| 1338847 | N/A | N/A | 84781 | 84800 | ATCCAGAATTCCAGCCGTAC | 44 | 1612 |
| 1338896 | N/A | N/A | 70357 | 70376 | GTGGGCATCCCCATACTGCC | 61 | 1613 |
| 1338936 | N/A | N/A | 55266 | 55285 | TGGCCAGCTCCTCTTGTCTT | 10 | 1614 |
| 1338955 | N/A | N/A | 53947 | 53966 | TGGAGACACCATCTTCGGAA | 28 | 1615 |
| 1338956 | N/A | N/A | 24175 | 24194 | CGCTTGAGTCATAAAGACGC | 39 | 1616 |
| 1338971* | N/A | N/A | 52174 | 52193 | CAGGCACCCCACTCACTCGA | 58 | 1617 |
| 1338973 | N/A | N/A | 74942 | 74961 | GGCAGCACTCACTCTACCAC | 52 | 1618 |
| 1338987 | N/A | N/A | 47465 | 47484 | CTTCGACTCACCGTGGCTCC | 34 | 1619 |
| 1338998 | N/A | N/A | 41165 | 41184 | AGCTCCTCAGCATGGGCCCC | 50 | 1620 |
| | N/A | N/A | 50776 | 50795 | | | |
| 1339006 | N/A | N/A | 75846 | 75865 | CCTTGGGCTCTTACCCACAT | 46 | 1621 |
| 1339019 | N/A | N/A | 29975 | 29994 | TTTTAACCCTCTTTGCCGCC | 71 | 1622 |
| 1339038 | N/A | N/A | 65552 | 65571 | CATGGGACAATCTCCCCCAA | 34 | 1623 |
| 1339058 | N/A | N/A | 93398 | 93417 | CATGCATGCCTTCATCTACA | 22 | 1624 |
| 1339077 | N/A | N/A | 48942 | 48961 | ACCAGGCCAACCATCCCCCA | 59 | 1625 |
| 1339166 | N/A | N/A | 26816 | 26835 | GAGGAAGCTCCAATCCAGGT | 43 | 1626 |
| 1339211 | 4681 | 4700 | 95060 | 95079 | GAACCAGCAGCAAAGGACGC | 42 | 1627 |
| 1339226 | N/A | N/A | 78951 | 78970 | TTGGTTTCCAATCATCATTT | 31 | 1628 |
| 1339339 | N/A | N/A | 30913 | 30932 | CAATCCCGAACACCATGTCA | 61 | 1629 |
| 1339347 | N/A | N/A | 88946 | 88965 | GCCCAACTCTAGCTGATGCC | 23 | 1630 |
| 1339351 | N/A | N/A | 91317 | 91336 | GCAGCTCCCCAGCCCCAGAA | 15 | 1631 |
| 1339472 | N/A | N/A | 68132 | 68151 | ATGGTCCACACTAAATGGTC | 40 | 1632 |
| 1339496 | N/A | N/A | 61469 | 61488 | GCCGGAGCCACCTCCTGCCT | 16 | 1633 |
| 1339501 | N/A | N/A | 93068 | 93087 | GCAGCTCATCCCTCCGAGAA | 26 | 1634 |
| 1339526 | N/A | N/A | 31908 | 31927 | CCACAGGCCACCTTGAGGTG | 56 | 1635 |
| 1339577 | N/A | N/A | 19431 | 19450 | GCCCCCCACCTTCCAGATCT | 40 | 1636 |
| 1339605 | N/A | N/A | 82338 | 82357 | CCACGGTGTCACAATCCTGC | 38 | 1637 |
| 1339655 | N/A | N/A | 20846 | 20865 | GCCGAGCTCTTCTCTGTCCA | 25 | 1638 |

TABLE 22
Reduction of KCNT1 RNA by 4,000 nM 5-10-5 MOE gapmers with a
mixed backbone measured with human KCNT1 primer probe set RTS39496

| | SEQ | SEQ | SEQ | SEQ | | | |
|---|---|---|---|---|---|---|---|
| | ID | ID | ID | ID | | | |
| | NO: 1 | NO: 1 | NO: 2 | NO: 2 | | | SEQ |
| Compound | Start | Stop | Start | Stop | | KCNT1 | ID |
| Number | Site | Site | Site | Site | Sequence (5′ to 3′) | (% UTC) | No. |
| 1080855 | 3854 | 3873 | 94233 | 94252 | GTCACGCTAGTGCCACCGTG | 26 | 283 |
| 1337255 | N/A | N/A | 56666 | 56685 | GGGCTATCTAACCCACAGCC | 28 | 1639 |
| 1337274 | N/A | N/A | 74939 | 74958 | AGCACTCACTCTACCACGGA | 68 | 1640 |
| 1337314 | N/A | N/A | 62360 | 62379 | GCACTTCACACCCTGAGGCA | 18 | 1641 |
| 1337324 | N/A | N/A | 85684 | 85703 | TCCCGAAATTCCAAATCCTC | 51 | 1642 |
| 1337349* | N/A | N/A | 52173 | 52192 | AGGCACCCCACTCACTCGAT | 52 | 1643 |
| 1337385 | N/A | N/A | 24174 | 24193 | GCTTGAGTCATAAAGACGCA | 32 | 1644 |
| 1337403 | N/A | N/A | 31837 | 31856 | CCATCAGGCCATCTTTGACA | 55 | 1645 |
| 1337421 | N/A | N/A | 27358 | 27377 | GATCTGAGCCCCTCGGTCCA | 22 | 1646 |
| 1337445 | N/A | N/A | 23051 | 23070 | GCATGGTTCCCCGACTCCTC | 23 | 1647 |
| 1337470 | N/A | N/A | 56051 | 56070 | AGTGGAGACTCATCCCACCC | 29 | 1648 |
| | | | 56115 | 56134 | | | |
| 1337512 | N/A | N/A | 76922 | 76941 | GACTTAGCCCCATCAGGGCC | 83 | 1649 |
| 1337520 | N/A | N/A | 57688 | 57707 | CCTGGTTTCCCTATTTACTG | 26 | 1650 |
| 1337543 | N/A | N/A | 39612 | 39631 | GCCCATCTCCCCATGCTTGT | 52 | 1651 |
| 1337581 | N/A | N/A | 48392 | 48411 | CCCCTTGACCTCCTCCTGGC | 41 | 1652 |
| 1337593 | N/A | N/A | 51003 | 51022 | CACATGTCCCCCTAAACGGC | 85 | 1653 |
| 1337661 | N/A | N/A | 47384 | 47403 | TCTCCGCTTCCTGTCAGGGC | 53 | 1654 |
| 1337695 | N/A | N/A | 53932 | 53951 | CGGAAGGACATTCAGAGAAA | 33 | 1655 |
| 1337705 | N/A | N/A | 37924 | 37943 | CCGTTCCCTTCCATGTCACA | 42 | 1656 |
| 1337713 | N/A | N/A | 84746 | 84765 | GTGAAATTCCAGAACAACTT | 77 | 1657 |
| 1337719 | N/A | N/A | 80638 | 80657 | GGATGCGGCCCACTCCCCAC | 66 | 1658 |
| 1337745 | N/A | N/A | 20841 | 20860 | GCTCTTCTCTGTCCAAGGCC | 34 | 1659 |
| 1337757 | N/A | N/A | 34411 | 34430 | GGCACAACAAGATCCAGGCA | 15 | 1660 |
| 1337762 | N/A | N/A | 86403 | 86422 | CTCGCCACCCCTCATGCATA | 41 | 1661 |
| 1337797 | N/A | N/A | 40414 | 40433 | GAAGAACAAACCTACCAAGT | 59 | 1662 |
| 1337811 | N/A | N/A | 28083 | 28102 | TTGCCGGCCCTTCTGTGGAT | 38 | 1663 |
| 1337812 | N/A | N/A | 93067 | 93086 | CAGCTCATCCCTCCGAGAAC | 20 | 1664 |
| 1337865 | N/A | N/A | 42685 | 42704 | GTCAACACACGAACAGAACC | 47 | 1665 |
| 1337913 | N/A | N/A | 67268 | 67287 | ACTCAGGGACTTGCCAAGCA | 55 | 1666 |
| | | | 67389 | 67408 | | | |
| 1337921 | N/A | N/A | 29966 | 29985 | TCTTTGCCGCCCTCTTTTAA | 46 | 1667 |
| 1337985 | N/A | N/A | 58505 | 58524 | CCTGGTTTTCCCCCACGGAA | 35 | 1668 |
| 1338033 | N/A | N/A | 59648 | 59667 | TTTGTCACACCCTTCACTTT | 65 | 1669 |
| 1338035 | N/A | N/A | 37046 | 37065 | GGAAGCCCCCTTCAACCCTC | 47 | 1670 |
| 1338054 | N/A | N/A | 83280 | 83299 | GCATCTGTCCCACATGGACC | 69 | 1671 |
| 1338068 | N/A | N/A | 26739 | 26758 | GCTAGGGATCCCAATGAAAT | 25 | 1672 |
| 1338084 | N/A | N/A | 63574 | 63593 | AAGCAGGTCCCCCTGCACCT | 29 | 1673 |
| 1338116 | 4638 | 4657 | 95017 | 95036 | CGCCGCCCGGGATCTCGCCT | 21 | 1674 |
| 1338122 | N/A | N/A | 68131 | 68150 | TGGTCCACACTAAATGGTCC | 43 | 1675 |
| 1338172 | N/A | N/A | 20079 | 20098 | CAGGAGGGTCCTCCAAGCGG | 37 | 1676 |
| 1338235 | N/A | N/A | 17145 | 17164 | GGACAAGCTCCCTCATTGAA | 42 | 1677 |
| 1338239 | N/A | N/A | 49817 | 49836 | CTTGTCACCCCACCGGGCAT | 51 | 1678 |
| 1338353 | N/A | N/A | 90105 | 90124 | CTGGCTGTTAAATTTGCTAC | 38 | 1679 |
| 1338358 | N/A | N/A | 44119 | 44138 | GACCTGGACACACCACCCTC | 75 | 1680 |
| 1338378 | N/A | N/A | 22469 | 22488 | GAGGAGGGCACTTATGCAAT | 23 | 1681 |
| 1338461 | N/A | N/A | 45952 | 45971 | GCTTCAGGCCCACTGCCAAC | 69 | 1682 |
| 1338491 | N/A | N/A | 55251 | 55270 | GTCTTTTCTTTCAACTGATC | 8 | 1683 |
| 1338563 | 3935 | 3954 | 94314 | 94333 | CTGGCCCTCCCCCCGCATGA | 35 | 1684 |
| 1338593 | N/A | N/A | 78949 | 78968 | GGTTTCCAATCATCATTTTC | 59 | 1685 |
| 1338603 | N/A | N/A | 25084 | 25103 | CTTCACTCACACAGTGGCCG | 39 | 1686 |
| 1338711 | N/A | N/A | 88516 | 88535 | CCGTGTGCCCTTACCGTAGC | 29 | 1687 |
| 1338722 | N/A | N/A | 45286 | 45305 | AAGCCTCTTCCATTTGACCT | 41 | 1688 |
| 1338742 | N/A | N/A | 87522 | 87541 | GCTTCCCCACCACCAGTGCA | 18 | 1689 |
| 1338750 | N/A | N/A | 75845 | 75864 | CTTGGGCTCTTACCCACATA | 64 | 1690 |
| 1338774 | N/A | N/A | 70354 | 70373 | GGCATCCCCATACTGCCCCC | 36 | 1691 |
| 1338827 | N/A | N/A | 21813 | 21832 | AAGGCGGCCACTCCCTTCCC | 35 | 1692 |
| 1338876 | N/A | N/A | 18297 | 18316 | ACAATTTGATCAACCACAGC | 56 | 1693 |
| 1338909 | N/A | N/A | 18838 | 18857 | CAATAGAACCTCACTGTATA | 70 | 1694 |
| 1338966 | 2000 | 2019 | 73013 | 73032 | AGAAGGCCCTCTTCTTCCGC | 30 | 1695 |
| 1339036 | N/A | N/A | 65547 | 65566 | GACAATCTCCCCCAAAGCGG | 27 | 1696 |
| 1339051 | N/A | N/A | 82337 | 82356 | CACGGTGTCACAATCCTGCA | 71 | 1697 |
| 1339096 | N/A | N/A | 69087 | 69106 | TAAGGACACATTCAGGCTCC | 53 | 1698 |
| 1339134 | N/A | N/A | 77983 | 78002 | ATCGCAGACCCACCTGCCAC | 55 | 1699 |
| 1339138 | N/A | N/A | 32419 | 32438 | ACGATAATTTCCCATCTTCA | 42 | 1700 |
| 1339191 | N/A | N/A | 71499 | 71518 | CCAGGATCCCAGCATAAGAC | 25 | 1701 |
| 1339263 | N/A | N/A | 33359 | 33378 | GGTGGAGTAAAAACAATGAT | 52 | 1702 |
| 1339309 | N/A | N/A | 35667 | 35686 | GGTACAGCCTGAAACTGGCC | 26 | 1703 |
| 1339322 | N/A | N/A | 61467 | 61486 | CGGAGCCACCTCCTGCCTGA | 27 | 1704 |
| 1339329 | N/A | N/A | 68548 | 68567 | GATGGTCCACCCCAGACGAT | 23 | 1705 |
| 1339357 | N/A | N/A | 19331 | 19350 | AGCTAAGTCCCCTCCCTGTC | 85 | 1706 |
| 1339377 | N/A | N/A | 48941 | 48960 | CCAGGCCAACCATCCCCCAC | 53 | 1707 |
| 1339445 | N/A | N/A | 17835 | 17854 | GTTCACACAACCAAATGTTA | 46 | 1708 |
| 1339508 | N/A | N/A | 93396 | 93415 | TGCATGCCTTCATCTACACC | 29 | 1709 |
| 1339531 | N/A | N/A | 30873 | 30892 | GTCTCAGATTCACAATCCCG | 24 | 1710 |
| 1339580 | N/A | N/A | 92109 | 92128 | CGGCAGGCACAGACTGGCCC | 32 | 1711 |
| 1339583 | N/A | N/A | 40974 | 40993 | GCTCAGGGCCTCCTGATGCA | 59 | 1712 |
| 1339603 | 4353 | 4372 | 94732 | 94751 | ATGCCCGGCTTCCCCGGGCC | 75 | 1713 |
| 1339615 | N/A | N/A | 31360 | 31379 | GAGGACCCCCTTTCTTGCTG | 52 | 1714 |
| 1339663 | N/A | N/A | 91291 | 91310 | CACCGTCACCCTCCCGGGCA | 30 | 1715 |

TABLE 23
Reduction of KCNT1 RNA by 4,000 nM 5-10-5 MOE gapmers with a
mixed backbone measured with human KCNT1 primer probe set RTS39496

| | SEQ | SEQ | SEQ | SEQ | | | |
|---|---|---|---|---|---|---|---|
| | ID | ID | ID | ID | | | |
| | NO: 1 | NO: 1 | NO: 2 | NO: 2 | | | SEQ |
| Compound | Start | Stop | Start | Stop | | KCNT1 | ID |
| Number | Site | Site | Site | Site | Sequence (5′ to 3′) | (% UTC) | No. |
| 1080855 | 3854 | 3873 | 94233 | 94252 | GTCACGCTAGTGCCACCGTG | 33 | 283 |
| 1337281 | N/A | N/A | 23050 | 23069 | CATGGTTCCCCGACTCCTCC | 29 | 1716 |
| 1337287 | N/A | N/A | 37916 | 37935 | TTCCATGTCACAGACGCGGC | 29 | 1717 |
| 1337288 | N/A | N/A | 21812 | 21831 | AGGCGGCCACTCCCTTCCCA | 46 | 1718 |
| 1337299 | N/A | N/A | 65509 | 65528 | GCCAACCCCTCCACTTCCGA | 21 | 1719 |
| 1337442 | 3882 | 3901 | 94261 | 94280 | ATGGTGAGTAGAGTGTGCCA | 23 | 1720 |
| 1337465 | N/A | N/A | 20063 | 20082 | GCGGCTGATCCCCTCCTCCA | 49 | 1721 |
| 1337482 | N/A | N/A | 93395 | 93414 | GCATGCCTTCATCTACACCT | 16 | 1722 |
| 1337539 | N/A | N/A | 74626 | 74645 | CAGGTGAACACAGTCAGCTC | 31 | 1723 |
| 1337580 | N/A | N/A | 76921 | 76940 | ACTTAGCCCCATCAGGGCCT | 59 | 1724 |
| 1337592 | N/A | N/A | 62326 | 62345 | GCCTCCACCTTTCCCACTGA | 39 | 1725 |
| 1337636 | N/A | N/A | 57687 | 57706 | CTGGTTTCCCTATTTACTGA | 29 | 1726 |
| 1337730 | N/A | N/A | 28040 | 28059 | GTCTCTTGCCCTGACAGGCC | 40 | 1727 |
| 1337751 | N/A | N/A | 24117 | 24136 | TCACGGACCCTCCTCCATGC | 73 | 1728 |
| 1337772 | N/A | N/A | 26736 | 26755 | AGGGATCCCAATGAAATACA | 72 | 1729 |
| 1337778 | N/A | N/A | 49771 | 49790 | GGGACAAGCCTCCCACAGAC | 88 | 1730 |
| 1337789 | N/A | N/A | 71498 | 71517 | CAGGATCCCAGCATAAGACT | 36 | 1731 |
| 1337818 | N/A | N/A | 85683 | 85702 | CCCGAAATTCCAAATCCTCC | 41 | 1732 |
| 1337825 | N/A | N/A | 24945 | 24964 | GAGGATTTCCCACGACATCT | 2 | 1733 |
| 1337843 | N/A | N/A | 50908 | 50927 | CGTCTGCTCCTATCAGTCGG | 32 | 1734 |
| 1337849 | N/A | N/A | 61400 | 61419 | CGGCGAATTCCCCGGAGCCT | 35 | 1735 |
| 1337852 | N/A | N/A | 86402 | 86421 | TCGCCACCCCTCATGCATAC | 60 | 1736 |
| 1337854 | N/A | N/A | 48940 | 48959 | CAGGCCAACCATCCCCCACC | 99 | 1737 |
| 1337859 | N/A | N/A | 45285 | 45304 | AGCCTCTTCCATTTGACCTA | 45 | 1738 |
| 1337890 | N/A | N/A | 56049 | 56068 | TGGAGACTCATCCCACCCCA | 28 | 1739 |
| | | | 56113 | 56132 | | | |
| 1337907 | N/A | N/A | 40936 | 40955 | GCCCTGTCCCCCCATTGGGC | 77 | 1740 |
| 1337924 | N/A | N/A | 47241 | 47260 | GGGCTAGGAAGAACCTGCCT | 70 | 1741 |
| 1337971 | N/A | N/A | 33311 | 33330 | ACACTGTGATCCAAAATGAA | 70 | 1742 |
| 1338019 | N/A | N/A | 30792 | 30811 | GTTTGTGAATCACCATAACC | 35 | 1743 |
| 1338031 | N/A | N/A | 59645 | 59664 | GTCACACCCTTCACTTTGTC | 29 | 1744 |
| 1338044 | N/A | N/A | 40410 | 40429 | AACAAACCTACCAAGTCCTC | 51 | 1745 |
| 1338049 | N/A | N/A | 31836 | 31855 | CATCAGGCCATCTTTGACAC | 61 | 1746 |
| 1338110 | N/A | N/A | 67980 | 67999 | AATGGTCCATCCCAGAAGGT | 41 | 1747 |
| | | | 68119 | 68138 | | | |
| 1338141 | N/A | N/A | 87487 | 87506 | CAACAGCCTTCTCTGAGCCG | 35 | 1748 |
| 1338162 | N/A | N/A | 82335 | 82354 | CGGTGTCACAATCCTGCAGC | 44 | 1749 |
| 1338197 | N/A | N/A | 91775 | 91794 | GGCAGGGCCACCTCGCCCCT | 52 | 1750 |
| 1338295 | N/A | N/A | 44115 | 44134 | TGGACACACCACCCTCCACC | 49 | 1751 |
| 1338310 | N/A | N/A | 89952 | 89971 | GAGTCGGTCACCAGAAAGGC | 31 | 1752 |
| 1338317 | 4352 | 4371 | 94731 | 94750 | TGCCCGGCTTCCCCGGGCCC | 79 | 1753 |
| 1338326 | N/A | N/A | 75844 | 75863 | TTGGGCTCTTACCCACATAC | 34 | 1754 |
| 1338382 | 1999 | 2018 | 73012 | 73031 | GAAGGCCCTCTTCTTCCGCT | 25 | 1755 |
| 1338418 | N/A | N/A | 22461 | 22480 | CACTTATGCAATCCCAGGCT | 30 | 1756 |
| 1338439 | N/A | N/A | 17144 | 17163 | GACAAGCTCCCTCATTGAAT | 45 | 1757 |
| 1338454 | N/A | N/A | 93066 | 93085 | AGCTCATCCCTCCGAGAACA | 26 | 1758 |
| 1338502* | N/A | N/A | 52172 | 52191 | GGCACCCCACTCACTCGATC | 57 | 1759 |
| 1338549 | N/A | N/A | 35666 | 35685 | GTACAGCCTGAAACTGGCCA | 53 | 1760 |
| 1338572 | N/A | N/A | 19330 | 19349 | GCTAAGTCCCCTCCCTGTCC | 75 | 1761 |
| 1338621 | N/A | N/A | 80490 | 80509 | CGGCCACGCCTTACTTGTCC | 47 | 1762 |
| 1338625 | N/A | N/A | 18827 | 18846 | CACTGTATACTTCATTTCCA | 86 | 1763 |
| 1338650 | N/A | N/A | 53772 | 53791 | GGGCTGGTCCCCAAAGACAT | 12 | 1764 |
| 1338681 | N/A | N/A | 91290 | 91309 | ACCGTCACCCTCCCGGGCAT | 27 | 1765 |
| 1338708 | N/A | N/A | 42680 | 42699 | CACACGAACAGAACCTGCAC | 88 | 1766 |
| 1338799 | N/A | N/A | 39502 | 39521 | GACATGTGCCCACACCAGGC | 44 | 1767 |
| 1338814 | N/A | N/A | 56665 | 56684 | GGCTATCTAACCCACAGCCC | 69 | 1768 |
| 1338831 | N/A | N/A | 32415 | 32434 | TAATTTCCCATCTTCAAGGC | 73 | 1769 |
| 1338920 | N/A | N/A | 67265 | 67284 | CAGGGACTTGCCAAGCAGTC | 58 | 1770 |
| | | | 67386 | 67405 | | | |
| 1338993 | N/A | N/A | 58504 | 58523 | CTGGTTTTCCCCCACGGAAC | 65 | 1771 |
| 1338997 | N/A | N/A | 34376 | 34395 | GGACACTTCCACTGGAGGAT | 50 | 1772 |
| 1339018 | N/A | N/A | 88515 | 88534 | CGTGTGCCCTTACCGTAGCC | 40 | 1773 |
| 1339110 | N/A | N/A | 27350 | 27369 | CCCCTCGGTCCAGAATGGCC | 16 | 1774 |
| 1339112 | N/A | N/A | 31255 | 31274 | GTTCAGTTCCCTGCTGCCTC | 26 | 1775 |
| 1339124 | N/A | N/A | 29960 | 29979 | CCGCCCTCTTTTAAGGACTT | 27 | 1776 |
| 1339130 | 4619 | 4638 | 94998 | 95017 | TTGCTGAGAAGATCCTCTCT | 27 | 1777 |
| 1339157 | N/A | N/A | 48391 | 48410 | CCCTTGACCTCCTCCTGGCA | 58 | 1778 |
| 1339213 | N/A | N/A | 17834 | 17853 | TTCACACAACCAAATGTTAT | 54 | 1779 |
| 1339268 | N/A | N/A | 77982 | 78001 | TCGCAGACCCACCTGCCACC | 51 | 1780 |
| 1339308 | N/A | N/A | 63553 | 63572 | AGGATGAGTCCTCATTTGCA | 11 | 1781 |
| 1339338 | N/A | N/A | 18295 | 18314 | AATTTGATCAACCACAGCCA | 29 | 1782 |
| 1339360 | N/A | N/A | 55240 | 55259 | CAACTGATCCACTTTCCCCT | 16 | 1783 |
| 1339381 | N/A | N/A | 83279 | 83298 | CATCTGTCCCACATGGACCC | 60 | 1784 |
| 1339399 | N/A | N/A | 45950 | 45969 | TTCAGGCCCACTGCCAACCC | 60 | 1785 |
| 1339406 | N/A | N/A | 84689 | 84708 | CAGGAAACAAGAACCACGAC | 35 | 1786 |
| 1339410 | N/A | N/A | 69034 | 69053 | GGAGTGTCCCAGAAAGTGCA | 47 | 1787 |
| 1339448 | N/A | N/A | 70328 | 70347 | CCCAACCCACATCACAGTGT | 49 | 1788 |
| 1339461 | N/A | N/A | 37045 | 37064 | GAAGCCCCCTTCAACCCTCC | 54 | 1789 |
| 1339576 | N/A | N/A | 20808 | 20827 | GCTGTGGTGACTCACTGCCA | 35 | 1790 |
| 1339589 | N/A | N/A | 67947 | 67966 | TCCACCCCAGACGATCCACC | 27 | 1791 |
| | | | 68543 | 68562 | | | |
| 1339597 | N/A | N/A | 78897 | 78916 | GGTTCATTCCAGACTGGAGC | 33 | 1792 |

TABLE 24
Reduction of KCNT1 RNA by 4,000 nM 5-10-5 MOE gapmers with a
mixed backbone measured with human KCNT1 primer probe set RTS39496

| | SEQ | SEQ | SEQ | SEQ | | | |
|---|---|---|---|---|---|---|---|
| | ID | ID | ID | ID | | | |
| | NO: 1 | NO: 1 | NO: 2 | NO: 2 | | | SEQ |
| Compound | Start | Stop | Start | Stop | | KCNT1 | ID |
| Number | Site | Site | Site | Site | Sequence (5′ to 3′) | (% UTC) | No. |
| 1080855 | 3854 | 3873 | 94233 | 94252 | GTCACGCTAGTGCCACCGTG | 15 | 283 |
| 1080859 | 3877 | 3896 | 94256 | 94275 | GAGTAGAGTGTGCCATCCCC | 13 | 128 |
| 1337244 | N/A | N/A | 40935 | 40954 | CCCTGTCCCCCCATTGGGCA | 47 | 1793 |
| 1337262 | N/A | N/A | 24944 | 24963 | AGGATTTCCCACGACATCTT | 20 | 1794 |
| 1337313 | N/A | N/A | 58502 | 58521 | GGTTTTCCCCCACGGAACCC | 51 | 1795 |
| 1337356 | N/A | N/A | 50896 | 50915 | TCAGTCGGCTGCCTTAGCCC | 8 | 1796 |
| 1337367 | N/A | N/A | 48939 | 48958 | AGGCCAACCATCCCCCACCA | 54 | 1797 |
| 1337474 | N/A | N/A | 62166 | 62185 | GCCGGCTGTCCACCTTGACC | 46 | 1798 |
| 1337505 | N/A | N/A | 55206 | 55225 | TTGTTGCAAACTAAGTGCCC | 6 | 1799 |
| 1337521 | N/A | N/A | 68080 | 68099 | CCAGACAGTCCATCCTAGAT | 22 | 1800 |
| 1337523 | N/A | N/A | 45278 | 45297 | TCCATTTGACCTACATCTTA | 38 | 1801 |
| 1337555 | N/A | N/A | 53762 | 53781 | CCAAAGACATGACTCAGGAC | 23 | 1802 |
| 1337568* | N/A | N/A | 52171 | 52190 | GCACCCCACTCACTCGATCT | 36 | 1803 |
| 1337621 | N/A | N/A | 19319 | 19338 | TCCCTGTCCCATCCTATAGA | 52 | 1804 |
| 1337655 | N/A | N/A | 31823 | 31842 | TTGACACGGGCAACCAGGAC | 27 | 1805 |
| 1337678 | N/A | N/A | 74568 | 74587 | GAGGAGCTTCAATCTATGCC | 40 | 1806 |
| 1337701 | N/A | N/A | 61271 | 61290 | GGTCTGGCCCTCTACCCCCA | 14 | 1807 |
| 1337720 | N/A | N/A | 40384 | 40403 | GGAGCCTGCCCTACTCATCT | 23 | 1808 |
| 1337754 | N/A | N/A | 30789 | 30808 | TGTGAATCACCATAACCAGA | 15 | 1809 |
| 1337781 | N/A | N/A | 37705 | 37724 | CAGGGATCTGTCTCTATTTC | 30 | 1810 |
| 1337986 | N/A | N/A | 78861 | 78880 | GTGGCTGGAACATCTCCGGT | 31 | 1811 |
| 1338008 | N/A | N/A | 89951 | 89970 | AGTCGGTCACCAGAAAGGCA | 11 | 1812 |
| 1338026 | N/A | N/A | 49770 | 49789 | GGACAAGCCTCCCACAGACC | 58 | 1813 |
| 1338048 | N/A | N/A | 82334 | 82353 | GGTGTCACAATCCTGCAGCC | 33 | 1814 |
| 1338055 | N/A | N/A | 31244 | 31263 | TGCTGCCTCCAGTCACTTCA | 27 | 1815 |
| 1338076 | N/A | N/A | 92954 | 92973 | ACAGCCCCCCCATCATCTCA | 28 | 1816 |
| 1338091 | N/A | N/A | 18294 | 18313 | ATTTGATCAACCACAGCCAC | 39 | 1817 |
| 1338146 | N/A | N/A | 23046 | 23065 | GTTCCCCGACTCCTCCTCGA | 30 | 1818 |
| 1338151 | N/A | N/A | 17808 | 17827 | TCTGGTAGAATATTCCATTC | 8 | 1819 |
| 1338209 | N/A | N/A | 56664 | 56683 | GCTATCTAACCCACAGCCCC | 23 | 1820 |
| 1338233 | N/A | N/A | 76874 | 76893 | GGTAGGGCCCTCACTGCTGC | 13 | 1821 |
| 1338281 | N/A | N/A | 22460 | 22479 | ACTTATGCAATCCCAGGCTC | 23 | 1822 |
| 1338289 | N/A | N/A | 87461 | 87480 | GGCCGACACATCCGTGGGAC | 28 | 1823 |
| 1338299 | N/A | N/A | 35154 | 35173 | GGCTGCACTAACCCAGGACA | 26 | 1824 |
| 1338322 | N/A | N/A | 68541 | 68560 | CACCCCAGACGATCCACCCC | 48 | 1825 |
| 1338376 | 1998 | 2017 | 73011 | 73030 | AAGGCCCTCTTCTTCCGCTT | 19 | 1826 |
| 1338413 | N/A | N/A | 48390 | 48409 | CCTTGACCTCCTCCTGGCAC | 59 | 1827 |
| 1338437 | 4617 | 4636 | 94996 | 95015 | GCTGAGAAGATCCTCTCTCT | 13 | 1828 |
| 1338446 | N/A | N/A | 86379 | 86398 | CACACAGAACCACCAGGTCC | 31 | 1829 |
| 1338470 | N/A | N/A | 91739 | 91758 | TGACTCCTCCACCCAGACCC | 49 | 1830 |
| 1338480 | N/A | N/A | 45928 | 45947 | GGGCCAGCTATTCTGAGCCT | 55 | 1831 |
| 1338624 | 3275 | 3294 | 88220 | 88239 | CCCGTGTGTCCTCACAGTCC | 10 | 1832 |
| 1338648 | N/A | N/A | 27349 | 27368 | CCCTCGGTCCAGAATGGCCT | 28 | 1833 |
| 1338701 | N/A | N/A | 33280 | 33299 | CGACTGAGATTCTAACGCGA | 30 | 1834 |
| 1338723 | N/A | N/A | 29931 | 29950 | GTTTTGGGCCAGGATGGCCT | 26 | 1835 |
| 1338739 | 4350 | 4369 | 94729 | 94748 | CCCGGCTTCCCCGGGCCCTT | 21 | 1836 |
| 1338752 | N/A | N/A | 84684 | 84703 | AACAAGAACCACGACAGGGC | 45 | 1837 |
| 1338810 | N/A | N/A | 26731 | 26750 | TCCCAATGAAATACATGACA | 42 | 1838 |
| 1338834 | N/A | N/A | 37039 | 37058 | CCCTTCAACCCTCCTGTGGA | 50 | 1839 |
| 1338912 | N/A | N/A | 91266 | 91285 | GCCGAGCCCAGGAAATGCCT | 12 | 1840 |
| 1339008 | N/A | N/A | 69033 | 69052 | GAGTGTCCCAGAAAGTGCAC | 27 | 1841 |
| 1339042 | N/A | N/A | 44039 | 44058 | CAGTTGTCCCAGACTGGCCA | 27 | 1842 |
| 1339049 | N/A | N/A | 19951 | 19970 | GTCAGCATCCTGATTTCCCT | 12 | 1843 |
| 1339050 | N/A | N/A | 17143 | 17162 | ACAAGCTCCCTCATTGAATA | 37 | 1844 |
| 1339069 | N/A | N/A | 67264 | 67283 | AGGGACTTGCCAAGCAGTCC | 59 | 1845 |
| | | | 67385 | 67404 | | | |
| 1339074 | N/A | N/A | 75843 | 75862 | TGGGCTCTTACCCACATACT | 15 | 1846 |
| 1339100 | N/A | N/A | 71469 | 71488 | GAGTTTGGACCCCCTAGGTC | 18 | 1847 |
| 1339127 | N/A | N/A | 55985 | 56004 | TGTGGACTCACCAGTTGATC | 15 | 1848 |
| 1339143 | N/A | N/A | 77981 | 78000 | CGCAGACCCACCTGCCACCA | 28 | 1849 |
| 1339174 | N/A | N/A | 20792 | 20811 | GCCAGAGGCTCTACTCCCGG | 45 | 1850 |
| 1339218 | N/A | N/A | 70327 | 70346 | CCAACCCACATCACAGTGTC | 53 | 1851 |
| 1339248 | N/A | N/A | 85682 | 85701 | CCGAAATTCCAAATCCTCCT | 30 | 1852 |
| 1339260 | N/A | N/A | 21809 | 21828 | CGGCCACTCCCTTCCCAGGT | 33 | 1853 |
| 1339307 | N/A | N/A | 47184 | 47203 | GCAGAAGAATCTACTTCCTG | 24 | 1854 |
| 1339326 | N/A | N/A | 42671 | 42690 | AGAACCTGCACCCGAAGCCG | 39 | 1855 |
| 1339348 | N/A | N/A | 32414 | 32433 | AATTTCCCATCTTCAAGGCC | 54 | 1856 |
| 1339349 | N/A | N/A | 34341 | 34360 | GTAGAAGCCTCAACTAGTTT | 53 | 1857 |
| 1339379 | N/A | N/A | 59644 | 59663 | TCACACCCTTCACTTTGTCC | 28 | 1858 |
| 1339416 | N/A | N/A | 65508 | 65527 | CCAACCCCTCCACTTCCGAT | 10 | 1859 |
| 1339418 | N/A | N/A | 18825 | 18844 | CTGTATACTTCATTTCCAAC | 14 | 1860 |
| 1339439 | N/A | N/A | 63552 | 63571 | GGATGAGTCCTCATTTGCAA | 19 | 1861 |
| 1339475 | N/A | N/A | 24115 | 24134 | ACGGACCCTCCTCCATGCCC | 17 | 1862 |
| 1339528 | N/A | N/A | 83278 | 83297 | ATCTGTCCCACATGGACCCC | 26 | 1863 |
| 1339591 | N/A | N/A | 27994 | 28013 | CGAGCCCCCACAGCCATGGC | 23 | 1864 |
| 1339600 | 2643 | 2662 | 80470 | 80489 | ACAGAGCCCTCCATGTAGTA | 42 | 1865 |
| 1339625 | N/A | N/A | 39479 | 39498 | GTCTGATTCATCCTCATTTC | 22 | 1866 |
| 1339641 | N/A | N/A | 57684 | 57703 | GTTTCCCTATTTACTGAGCC | 15 | 1867 |
| 1339668 | N/A | N/A | 93391 | 93410 | GCCTTCATCTACACCTGCAC | 22 | 1868 |

TABLE 25
Reduction of KCNT1 RNA by 4,000 nM 5-10-5 MOE gapmers with a
mixed backbone measured with human KCNT1 primer probe set RTS39496

| | SEQ | SEQ | SEQ | SEQ | | | |
|---|---|---|---|---|---|---|---|
| | ID | ID | ID | ID | | | |
| | NO: 1 | NO: 1 | NO: 2 | NO: 2 | | | SEQ |
| Compound | Start | Stop | Start | Stop | | KCNT1 | ID |
| Number | Site | Site | Site | Site | Sequence (5′ to 3′) | (% UTC) | No. |
| 1080855 | 3854 | 3873 | 94233 | 94252 | GTCACGCTAGTGCCACCGTG | 18 | 283 |
| 1337294 | 3274 | 3293 | 88219 | 88238 | CCGTGTGTCCTCACAGTCCT | 12 | 1869 |
| 1337303 | N/A | N/A | 93390 | 93409 | CCTTCATCTACACCTGCACA | 27 | 1870 |
| 1337343 | N/A | N/A | 31240 | 31259 | GCCTCCAGTCACTTCACCTC | 25 | 1871 |
| 1337350 | N/A | N/A | 18293 | 18312 | TTTGATCAACCACAGCCACA | 52 | 1872 |
| 1337357 | 4616 | 4635 | 94995 | 95014 | CTGAGAAGATCCTCTCTCTC | 21 | 1873 |
| 1337401 | N/A | N/A | 80378 | 80397 | CCCACCCTGCTTCAAGGCCT | 42 | 1874 |
| 1337416 | N/A | N/A | 55175 | 55194 | TGGACATCCATCTATCATCC | 18 | 1875 |
| 1337424 | N/A | N/A | 67277 | 67296 | GCTGAGAGGACTCAGGGACT | 36 | 1876 |
| | | | 67398 | 67417 | | | |
| 1337491 | N/A | N/A | 63399 | 63418 | CCTCACTCCCGCCCTTGCCT | 25 | 1877 |
| 1337496 | N/A | N/A | 37702 | 37721 | GGATCTGTCTCTATTTCTTC | 30 | 1878 |
| 1337527 | N/A | N/A | 83270 | 83289 | CACATGGACCCCAGCACCAT | 98 | 1879 |
| 1337552 | N/A | N/A | 26730 | 26749 | CCCAATGAAATACATGACAC | 59 | 1880 |
| 1337563 | N/A | N/A | 92953 | 92972 | CAGCCCCCCCATCATCTCAC | 33 | 1881 |
| 1337590 | N/A | N/A | 89933 | 89952 | CAGTTGCTCCTTCCTTGCCA | 20 | 1882 |
| 1337633 | N/A | N/A | 35153 | 35172 | GCTGCACTAACCCAGGACAA | 30 | 1883 |
| 1337691 | N/A | N/A | 18770 | 18789 | TGCCCTGTACCCCATGGGCC | 93 | 1884 |
| 1337717 | N/A | N/A | 45876 | 45895 | AAAGGGCACACACATGTCTC | 38 | 1885 |
| 1337734 | N/A | N/A | 68022 | 68041 | TGACAGTTCACTCCAGATGA | 49 | 1886 |
| 1337761 | N/A | N/A | 61134 | 61153 | CCAGATGCTATCCTCATGGA | 15 | 1887 |
| 1337826 | N/A | N/A | 19945 | 19964 | ATCCTGATTTCCCTCATTGT | 27 | 1888 |
| 1337863 | N/A | N/A | 37024 | 37043 | GTGGAGTGCCCCAGAACGGC | 31 | 1889 |
| 1337895 | N/A | N/A | 58494 | 58513 | CCCACGGAACCCCTCTCAGC | 53 | 1890 |
| 1337911 | N/A | N/A | 57683 | 57702 | TTTCCCTATTTACTGAGCCT | 22 | 1891 |
| 1337930 | N/A | N/A | 78860 | 78879 | TGGCTGGAACATCTCCGGTT | 42 | 1892 |
| 1338025 | N/A | N/A | 21808 | 21827 | GGCCACTCCCTTCCCAGGTG | 47 | 1893 |
| 1338070 | N/A | N/A | 32413 | 32432 | ATTTCCCATCTTCAAGGCCC | 41 | 1894 |
| 1338083 | 1868 | 1887 | 72881 | 72900 | TCTTGTTGTCCTCCCGCTTC | 31 | 1895 |
| 1338113 | N/A | N/A | 85672 | 85691 | AAATCCTCCTGATAATCCTC | 59 | 1896 |
| 1338117 | N/A | N/A | 24087 | 24106 | AGGTGATGCCCCACAAGACA | 38 | 1897 |
| 1338173 | N/A | N/A | 68537 | 68556 | CCAGACGATCCACCCCAGAT | 54 | 1898 |
| 1338260 | N/A | N/A | 17802 | 17821 | AGAATATTCCATTCCCCGCA | 23 | 1899 |
| 1338329 | N/A | N/A | 29910 | 29929 | CCCACTGCAACATCTTTCCC | 47 | 1900 |
| 1338344 | N/A | N/A | 30788 | 30807 | GTGAATCACCATAACCAGAC | 19 | 1901 |
| 1338361 | N/A | N/A | 41166 | 41185 | GAGCTCCTCAGCATGGGCCC | 66 | 1902 |
| | | | 50777 | 50796 | | | |
| 1338363 | N/A | N/A | 91738 | 91757 | GACTCCTCCACCCAGACCCT | 54 | 1903 |
| 1338416 | N/A | N/A | 47179 | 47198 | AGAATCTACTTCCTGTGTCC | 20 | 1904 |
| 1338458 | 3872 | 3891 | 94251 | 94270 | GAGTGTGCCATCCCCAGGGT | 12 | 1905 |
| 1338511 | N/A | N/A | 70316 | 70335 | CACAGTGTCCCCCACGGGCA | 28 | 1906 |
| 1338587 | N/A | N/A | 34077 | 34096 | GTGAGCTGAAATATCATGCC | 51 | 1907 |
| 1338590 | N/A | N/A | 56663 | 56682 | CTATCTAACCCACAGCCCCC | 52 | 1908 |
| 1338595 | N/A | N/A | 91139 | 91158 | GACGCAGGCATCCCACTCAT | 34 | 1909 |
| 1338644 | N/A | N/A | 55890 | 55909 | CCCTGGCCCCTCTAGCACCA | 24 | 1910 |
| 1338737 | N/A | N/A | 17140 | 17159 | AGCTCCCTCATTGAATAATT | 43 | 1911 |
| 1338754 | N/A | N/A | 62165 | 62184 | CCGGCTGTCCACCTTGACCC | 30 | 1912 |
| 1338767 | N/A | N/A | 24939 | 24958 | TTCCCACGACATCTTTTGCA | 43 | 1913 |
| 1338796 | N/A | N/A | 40925 | 40944 | CCATTGGGCACTTTTACTCA | 50 | 1914 |
| 1338801 | N/A | N/A | 48375 | 48394 | GGCACCCCAGAAACAAGAGC | 38 | 1915 |
| 1338809 | N/A | N/A | 69019 | 69038 | GTGCACCGACACATTCTGGA | 18 | 1916 |
| 1338837 | 4344 | 4363 | 94723 | 94742 | TTCCCCGGGCCCTTTGCTGC | 26 | 1917 |
| 1338848 | N/A | N/A | 82333 | 82352 | GTGTCACAATCCTGCAGCCA | 39 | 1918 |
| 1338857 | N/A | N/A | 49769 | 49788 | GACAAGCCTCCCACAGACCA | 50 | 1919 |
| 1338892 | N/A | N/A | 23044 | 23063 | TCCCCGACTCCTCCTCGAAC | 64 | 1920 |
| 1338929 | N/A | N/A | 77801 | 77820 | CCTCGGCCCAATCTGAACTT | 58 | 1921 |
| 1338932* | 360 | 379 | 52129 | 52148 | TTGAGCCGCTCCTTGAAGGT | 3 | 1922 |
| 1338980 | N/A | N/A | 40380 | 40399 | CCTGCCCTACTCATCTCAGC | 33 | 1923 |
| 1339014 | N/A | N/A | 84626 | 84645 | TCAGGACCTTCCAGAGATTT | 48 | 1924 |
| 1339144 | N/A | N/A | 19317 | 19336 | CCTGTCCCATCCTATAGACA | 47 | 1925 |
| 1339219 | N/A | N/A | 74567 | 74586 | AGGAGCTTCAATCTATGCCT | 25 | 1926 |
| 1339220 | N/A | N/A | 22432 | 22451 | AGGGATGATTCTAGAAGGCC | 48 | 1927 |
| 1339243 | N/A | N/A | 59608 | 59627 | CCATTTCATTTCCAGGCTTA | 24 | 1928 |
| 1339272 | N/A | N/A | 39473 | 39492 | TTCATCCTCATTTCCCCCGC | 42 | 1929 |
| 1339290 | N/A | N/A | 42660 | 42679 | CCGAAGCCGTCACCTCCCTC | 39 | 1930 |
| 1339334 | N/A | N/A | 76820 | 76839 | GGGCTCACCCCTCACCTGGT | 46 | 1931 |
| 1339341 | N/A | N/A | 48938 | 48957 | GGCCAACCATCCCCCACCAA | 83 | 1932 |
| 1339353 | N/A | N/A | 86362 | 86381 | TCCCCAAGCACCACATGACC | 47 | 1933 |
| 1339362 | N/A | N/A | 27337 | 27356 | AATGGCCTCACCTTGAGATC | 25 | 1934 |
| 1339371 | N/A | N/A | 20738 | 20757 | TGCTCGCTCACAGCCTGCCA | 23 | 1935 |
| 1339391 | N/A | N/A | 27910 | 27929 | CCAGGTGGTTCCTCCTGCCA | 35 | 1936 |
| 1339408 | N/A | N/A | 87383 | 87402 | AGGCTTCTCCATGTGAAGCT | 39 | 1937 |
| 1339419 | N/A | N/A | 45275 | 45294 | ATTTGACCTACATCTTAGCT | 77 | 1938 |
| 1339424 | N/A | N/A | 75841 | 75860 | GGCTCTTACCCACATACTTG | 34 | 1939 |
| 1339486 | N/A | N/A | 65507 | 65526 | CAACCCCTCCACTTCCGATT | 32 | 1940 |
| 1339517 | N/A | N/A | 53757 | 53776 | GACATGACTCAGGACAGGCC | 8 | 1941 |
| 1339554 | N/A | N/A | 71468 | 71487 | AGTTTGGACCCCCTAGGTCC | 36 | 1942 |
| 1339598 | N/A | N/A | 33277 | 33296 | CTGAGATTCTAACGCGAGCC | 32 | 1943 |
| 1339632 | N/A | N/A | 31804 | 31823 | CCTGAGGCCACACGCAGACA | 51 | 1944 |
| 1339662 | N/A | N/A | 44003 | 44022 | AAGGTGGTTGCAACCTGCAC | 46 | 1945 |

TABLE 26
Reduction of KCNT1 RNA by 4,000 nM 5-10-5 MOE gapmers with a
mixed backbone measured with human KCNT1 primer probe set RTS39496

| | SEQ | SEQ | SEQ | SEQ | | | |
|---|---|---|---|---|---|---|---|
| | ID | ID | ID | ID | | | |
| | NO: 1 | NO: 1 | NO: 2 | NO: 2 | | | SEQ |
| Compound | Start | Stop | Start | Stop | | KCNT1 | ID |
| Number | Site | Site | Site | Site | Sequence (5′ to 3′) | (% UTC) | No. |
| 1080855 | 3854 | 3873 | 94233 | 94252 | GTCACGCTAGTGCCACCGTG | 26 | 283 |
| 1337240 | N/A | N/A | 53715 | 53734 | TGCTGATGTCCCCTGGGACC | 29 | 1946 |
| 1337309 | N/A | N/A | 83188 | 83207 | GTCCCTGTCACACAACTGCC | 36 | 1947 |
| 1337312 | N/A | N/A | 27908 | 27927 | AGGTGGTTCCTCCTGCCAGA | 34 | 1948 |
| 1337336 | N/A | N/A | 57563 | 57582 | GAGTTTGTCCCCAGTGCTCA | 31 | 1949 |
| 1337374 | N/A | N/A | 55823 | 55842 | GGGCCTCCTACTCACCCACC | 24 | 1950 |
| 1337382 | N/A | N/A | 37628 | 37647 | GCCTAGGACCCCCTGACAGC | 68 | 1951 |
| 1337402 | N/A | N/A | 89929 | 89948 | TGCTCCTTCCTTGCCAAGCT | 31 | 1952 |
| 1337407 | N/A | N/A | 40378 | 40397 | TGCCCTACTCATCTCAGCGC | 41 | 1953 |
| 1337458 | N/A | N/A | 27328 | 27347 | ACCTTGAGATCCTCAACTAA | 51 | 1954 |
| 1337459 | N/A | N/A | 63383 | 63402 | GCCTGGTTATGAAATGCGCA | 19 | 1955 |
| 1337503 | N/A | N/A | 33276 | 33295 | TGAGATTCTAACGCGAGCCG | 60 | 1956 |
| 1337508 | N/A | N/A | 93368 | 93387 | CCTGCAGATTCACCTCTGTA | 43 | 1957 |
| 1337585 | N/A | N/A | 29904 | 29923 | GCAACATCTTTCCCTCACTC | 52 | 1958 |
| 1337601 | N/A | N/A | 45839 | 45858 | TGTTTTGACACCCTTGGGCC | 43 | 1959 |
| 1337609 | N/A | N/A | 48919 | 48938 | ACCTCAGGCTCCTGTACCCT | 39 | 1960 |
| 1337692 | N/A | N/A | 61133 | 61152 | CAGATGCTATCCTCATGGAT | 36 | 1961 |
| 1337774 | N/A | N/A | 18746 | 18765 | CTGGAGAGGACCCACAGCCA | 40 | 1962 |
| 1337832 | N/A | N/A | 24050 | 24069 | GCCCTGGTCACCGACAGCCT | 21 | 1963 |
| 1337834 | N/A | N/A | 82315 | 82334 | CACGCAGGTCCCAGCAGCTC | 45 | 1964 |
| 1337841 | N/A | N/A | 68018 | 68037 | AGTTCACTCCAGATGATCCA | 24 | 1965 |
| 1337869 | N/A | N/A | 41154 | 41173 | ATGGGCCCCCTGCCCAGTGC | 27 | 1966 |
| | | | 50765 | 50784 | | | |
| 1337885 | N/A | N/A | 33884 | 33903 | ACGGAGTCCCAGGAAAACAA | 52 | 1967 |
| 1337906 | N/A | N/A | 69018 | 69037 | TGCACCGACACATTCTGGAA | 38 | 1968 |
| 1337920 | N/A | N/A | 58493 | 58512 | CCACGGAACCCCTCTCAGCA | 48 | 1969 |
| 1337960 | N/A | N/A | 68532 | 68551 | CGATCCACCCCAGATGGTCC | 28 | 1970 |
| 1337973 | N/A | N/A | 17130 | 17149 | TTGAATAATTAATCAAGGAC | 61 | 1971 |
| 1338047 | N/A | N/A | 56621 | 56640 | CCTCATCCATAAACAGGCAG | 35 | 1972 |
| 1338096 | N/A | N/A | 36883 | 36902 | TCACCGCGCCATGACTGCAC | 13 | 1973 |
| 1338106 | N/A | N/A | 79652 | 79671 | AAGGAGAGTCCCCCTTTTTA | 100 | 1974 |
| 1338203 | N/A | N/A | 91136 | 91155 | GCAGGCATCCCACTCATGAA | 42 | 1975 |
| 1338219 | N/A | N/A | 92949 | 92968 | CCCCCCATCATCTCACAGTC | 55 | 1976 |
| 1338255 | N/A | N/A | 49707 | 49726 | AGAGTGCCCCATCATGCCCT | 32 | 1977 |
| 1338337 | N/A | N/A | 35150 | 35169 | GCACTAACCCAGGACAACAA | 25 | 1978 |
| 1338354 | N/A | N/A | 86360 | 86379 | CCCAAGCACCACATGACCCA | 64 | 1979 |
| 1338370 | N/A | N/A | 19942 | 19961 | CTGATTTCCCTCATTGTTGC | 39 | 1980 |
| 1338373 | N/A | N/A | 74566 | 74585 | GGAGCTTCAATCTATGCCTC | 30 | 1981 |
| 1338389 | N/A | N/A | 59489 | 59508 | TTCCCGGTCCTCTACAGGTC | 28 | 1982 |
| 1338408 | N/A | N/A | 30787 | 30806 | TGAATCACCATAACCAGACC | 29 | 1983 |
| 1338417 | N/A | N/A | 23043 | 23062 | CCCCGACTCCTCCTCGAACC | 39 | 1984 |
| 1338448 | N/A | N/A | 45274 | 45293 | TTTGACCTACATCTTAGCTG | 47 | 1985 |
| 1338534 | N/A | N/A | 91731 | 91750 | CCACCCAGACCCTCCGACCT | 57 | 1986 |
| 1338545 | N/A | N/A | 84618 | 84637 | TTCCAGAGATTTCCTCCTGC | 56 | 1987 |
| 1338558 | N/A | N/A | 42658 | 42677 | GAAGCCGTCACCTCCCTCCC | 46 | 1988 |
| 1338565 | N/A | N/A | 70315 | 70334 | ACAGTGTCCCCCACGGGCAT | 41 | 1989 |
| 1338614 | N/A | N/A | 22422 | 22441 | CTAGAAGGCCCTCAGCACAC | 45 | 1990 |
| 1338665 | N/A | N/A | 31794 | 31813 | CACGCAGACACCAAGGGCAC | 27 | 1991 |
| 1338778 | N/A | N/A | 62164 | 62183 | CGGCTGTCCACCTTGACCCT | 24 | 1992 |
| 1338783 | N/A | N/A | 19316 | 19335 | CTGTCCCATCCTATAGACAC | 34 | 1993 |
| 1338791 | N/A | N/A | 47167 | 47186 | CTGTGTCCATTCTCATCCAC | 67 | 1994 |
| 1338794 | N/A | N/A | 43884 | 43903 | CCTTCACTGACTATGTGCCT | 45 | 1995 |
| 1338807 | N/A | N/A | 18267 | 18286 | ATCGAGTCATCTGGGAGCCC | 26 | 1996 |
| 1338841 | N/A | N/A | 87216 | 87235 | GCACGGAACATGCTTAGGGC | 7 | 1997 |
| 1338842 | N/A | N/A | 67275 | 67294 | TGAGAGGACTCAGGGACTTG | 38 | 1998 |
| | | | 67396 | 67415 | | | |
| 1338859 | N/A | N/A | 48252 | 48271 | CCCACCTGCACAGATGGCAC | 53 | 1999 |
| 1338891 | 3870 | 3889 | 94249 | 94268 | GTGTGCCATCCCCAGGGTCA | 25 | 2000 |
| 1338902 | N/A | N/A | 65501 | 65520 | CTCCACTTCCGATTCTGTCC | 38 | 2001 |
| 1338904 | 4614 | 4633 | 94993 | 95012 | GAGAAGATCCTCTCTCTCCA | 23 | 2002 |
| 1338926 | N/A | N/A | 26729 | 26748 | CCAATGAAATACATGACACA | 62 | 2003 |
| 1338975 | N/A | N/A | 32404 | 32423 | CTTCAAGGCCCTCCACTTAA | 46 | 2004 |
| 1338979 | N/A | N/A | 72850 | 72869 | GCACACGCCATACCTGGGCA | 42 | 2005 |
| 1338981 | N/A | N/A | 76819 | 76838 | GGCTCACCCCTCACCTGGTC | 60 | 2006 |
| 1339101 | N/A | N/A | 71458 | 71477 | CCCTAGGTCCCTTCTCGGAT | 38 | 2007 |
| 1339153 | N/A | N/A | 31239 | 31258 | CCTCCAGTCACTTCACCTCT | 57 | 2008 |
| 1339231 | N/A | N/A | 40922 | 40941 | TTGGGCACTTTTACTCAAAA | 35 | 2009 |
| 1339238 | N/A | N/A | 39472 | 39491 | TCATCCTCATTTCCCCCGCA | 32 | 2010 |
| 1339287 | N/A | N/A | 52004 | 52023 | CCTGACTGACTTCTTCCAAC | 58 | 2011 |
| 1339310 | N/A | N/A | 75840 | 75859 | GCTCTTACCCACATACTTGT | 34 | 2012 |
| 1339316 | N/A | N/A | 24938 | 24957 | TCCCACGACATCTTTTGCAG | 37 | 2013 |
| 1339327 | N/A | N/A | 78802 | 78821 | TCAGAAGCACCCAGAAGCCG | 82 | 2014 |
| 1339382 | N/A | N/A | 17773 | 17792 | GTTTTAAGACCCCCTTTTTA | 70 | 2015 |
| 1339389 | N/A | N/A | 77775 | 77794 | TGGATCAGACACCCATGCCG | 77 | 2016 |
| 1339483 | N/A | N/A | 21698 | 21717 | GGACGAAGCTTCCTCTTGCC | 49 | 2017 |
| 1339513 | N/A | N/A | 55174 | 55193 | GGACATCCATCTATCATCCA | 23 | 2018 |
| 1339581 | 3271 | 3290 | 88216 | 88235 | TGTGTCCTCACAGTCCTCCA | 19 | 2019 |
| 1339596 | N/A | N/A | 85663 | 85682 | TGATAATCCTCTCCTCCCCC | 54 | 2020 |
| 1339646 | 4343 | 4362 | 94722 | 94741 | TCCCCGGGCCCTTTGCTGCT | 40 | 2021 |
| 1339650 | N/A | N/A | 20703 | 20722 | ACCCGCTTCCCTCACAGAGC | 55 | 2022 |

TABLE 27
Reduction of KCNT1 RNA by 4,000 nM 5-10-5 MOE gapmers with a
mixed backbone measured with human KCNT1 primer probe set RTS39496

| | SEQ | SEQ | SEQ | SEQ | | | |
|---|---|---|---|---|---|---|---|
| | ID | ID | ID | ID | | | |
| | NO: 1 | NO: 1 | NO: 2 | NO: 2 | | | SEQ |
| Compound | Start | Stop | Start | Stop | | KCNT1 | ID |
| Number | Site | Site | Site | Site | Sequence (5′ to 3′) | (% UTC) | No. |
| 1080855 | 3854 | 3873 | 94233 | 94252 | GTCACGCTAGTGCCACCGTG | 16 | 283 |
| 1337216 | N/A | N/A | 67267 | 67286 | CTCAGGGACTTGCCAAGCAG | 57 | 2023 |
| | | | 67388 | 67407 | | | |
| 1337218 | N/A | N/A | 18722 | 18741 | CTAGCTAGCACACACAGCCA | 61 | 2024 |
| 1337231 | N/A | N/A | 91728 | 91747 | CCCAGACCCTCCGACCTTTA | 50 | 2025 |
| 1337235 | N/A | N/A | 87155 | 87174 | GGGCTGCCCGTATTCTTCCT | 23 | 2026 |
| 1337236 | N/A | N/A | 27907 | 27926 | GGTGGTTCCTCCTGCCAGAC | 37 | 2027 |
| 1337238 | N/A | N/A | 67994 | 68013 | GTATGGTCCACCTAAATGGT | 40 | 2028 |
| 1337249 | 4581 | 4600 | 94960 | 94979 | GGAGGCTGAATTGTGCTTCA | 38 | 2029 |
| 1337308 | N/A | N/A | 35144 | 35163 | ACCCAGGACAACAAACAAGC | 41 | 2030 |
| 1337321 | N/A | N/A | 74565 | 74584 | GAGCTTCAATCTATGCCTCA | 54 | 2031 |
| 1337352 | N/A | N/A | 49632 | 49651 | ACGCCTCTCCTCTGTGTGCC | 45 | 2032 |
| 1337369 | N/A | N/A | 40377 | 40396 | GCCCTACTCATCTCAGCGCG | 43 | 2033 |
| 1337379 | N/A | N/A | 88001 | 88020 | CCTCTGGAAAGAATGTGCCT | 23 | 2034 |
| 1337490 | N/A | N/A | 78747 | 78766 | GGTCCGAGCATCAGAATCAA | 42 | 2035 |
| 1337566 | N/A | N/A | 61131 | 61150 | GATGCTATCCTCATGGATGC | 13 | 2036 |
| 1337579 | N/A | N/A | 22415 | 22434 | GCCCTCAGCACACCGAGTCA | 46 | 2037 |
| 1337666 | N/A | N/A | 89853 | 89872 | GGCGGGATCATCCTCTGCCA | 57 | 2038 |
| 1337716 | N/A | N/A | 53654 | 53673 | AGAGTAGGTCCCAGCAGCCG | 36 | 2039 |
| 1337755 | N/A | N/A | 47166 | 47185 | TGTGTCCATTCTCATCCACT | 37 | 2040 |
| 1337765 | 3857 | 3876 | 94236 | 94255 | AGGGTCACGCTAGTGCCACC | 27 | 2041 |
| 1337868 | N/A | N/A | 18251 | 18270 | GCCCCAGGCACCATTAGGCG | 34 | 2042 |
| 1337872 | N/A | N/A | 69017 | 69036 | GCACCGACACATTCTGGAAA | 34 | 2043 |
| 1337876 | N/A | N/A | 45273 | 45292 | TTGACCTACATCTTAGCTGA | 48 | 2044 |
| 1337912 | N/A | N/A | 48167 | 48186 | GCCAGAGACATTAATGAAGC | 38 | 2045 |
| 1337948 | N/A | N/A | 48887 | 48906 | ACCAGAGCCATCAGCAGGTC | 46 | 2046 |
| 1337949 | 4342 | 4361 | 94721 | 94740 | CCCCGGGCCCTTTGCTGCTT | 36 | 2047 |
| 1337983 | N/A | N/A | 33252 | 33271 | GAAAGACCCATCCCCAGAGA | 79 | 2048 |
| 1337995 | N/A | N/A | 43860 | 43879 | TGGACCAGCTCCTCCTCAAA | 43 | 2049 |
| 1338011 | N/A | N/A | 82160 | 82179 | GTGCTGTCCCAGCTTGAGCA | 56 | 2050 |
| 1338013 | N/A | N/A | 65493 | 65512 | CCGATTCTGTCCTCCAGGGC | 10 | 2051 |
| 1338052 | N/A | N/A | 16942 | 16961 | TCTGGAAGACTCCGCAGCTC | 27 | 2052 |
| 1338081 | N/A | N/A | 23040 | 23059 | CGACTCCTCCTCGAACCTTC | 31 | 2053 |
| 1338093 | N/A | N/A | 71422 | 71441 | TCTGCCGTCCCCTCCAGCAC | 27 | 2054 |
| 1338128 | N/A | N/A | 83187 | 83206 | TCCCTGTCACACAACTGCCA | 37 | 2055 |
| 1338170 | N/A | N/A | 19314 | 19333 | GTCCCATCCTATAGACACCA | 20 | 2056 |
| 1338184 | N/A | N/A | 24937 | 24956 | CCCACGACATCTTTTGCAGC | 21 | 2057 |
| 1338187 | N/A | N/A | 92948 | 92967 | CCCCCATCATCTCACAGTCT | 30 | 2058 |
| 1338191 | N/A | N/A | 40884 | 40903 | CCTGACCCCACCACTGAAGC | 61 | 2059 |
| 1338194 | N/A | N/A | 76797 | 76816 | CCCAGGACCCCCCCATGGTC | 65 | 2060 |
| 1338214 | N/A | N/A | 50742 | 50761 | GCGAGGGCCACAACACAGTA | 59 | 2061 |
| 1338216 | N/A | N/A | 45838 | 45857 | GTTTTGACACCCTTGGGCCT | 55 | 2062 |
| 1338244 | N/A | N/A | 57534 | 57553 | GGTCCCCTACTTACTAAGCC | 59 | 2063 |
| 1338277 | N/A | N/A | 33859 | 33878 | AGGATGCATTCCATCCAGAT | 33 | 2064 |
| 1338330 | N/A | N/A | 93366 | 93385 | TGCAGATTCACCTCTGTATT | 31 | 2065 |
| 1338406 | N/A | N/A | 24041 | 24060 | ACCGACAGCCTCTGTGGCCC | 34 | 2066 |
| 1338423 | N/A | N/A | 26721 | 26740 | ATACATGACACACCTGGTGA | 50 | 2067 |
| 1338469 | N/A | N/A | 17767 | 17786 | AGACCCCCTTTTTACAAATC | 58 | 2068 |
| 1338482 | N/A | N/A | 52001 | 52020 | GACTGACTTCTTCCAACTTT | 90 | 2069 |
| 1338484 | N/A | N/A | 91133 | 91152 | GGCATCCCACTCATGAAGGC | 21 | 2070 |
| 1338529 | N/A | N/A | 72827 | 72846 | GCACCGGCAACTTCAGGTAC | 73 | 2071 |
| 1338596 | N/A | N/A | 42630 | 42649 | GTCTCAGCCCTGCTTAGGGC | 26 | 2072 |
| 1338720 | N/A | N/A | 63303 | 63322 | ACCCCACCCCACATGGTGGT | 69 | 2073 |
| 1338768 | N/A | N/A | 37580 | 37599 | CCCAAACTCACACCAGAAGC | 64 | 2074 |
| 1338829 | N/A | N/A | 56516 | 56535 | ACAGGTCTTAATCTCTGGAC | 25 | 2075 |
| 1338880 | N/A | N/A | 32401 | 32420 | CAAGGCCCTCCACTTAATCA | 55 | 2076 |
| 1338930 | N/A | N/A | 77774 | 77793 | GGATCAGACACCCATGCCGG | 34 | 2077 |
| 1338933 | N/A | N/A | 75839 | 75858 | CTCTTACCCACATACTTGTC | 50 | 2078 |
| 1338991 | N/A | N/A | 36776 | 36795 | GCGGCTCGCTCACATTCCCT | 16 | 2079 |
| 1338995 | N/A | N/A | 21697 | 21716 | GACGAAGCTTCCTCTTGCCT | 29 | 2080 |
| 1339025 | N/A | N/A | 30782 | 30801 | CACCATAACCAGACCCGGCA | 28 | 2081 |
| 1339032 | N/A | N/A | 85537 | 85556 | GCAATGGACCCACTGAGTTT | 55 | 2082 |
| 1339116 | N/A | N/A | 68493 | 68512 | GGATGGCCCACCCCAGACAA | 28 | 2083 |
| 1339146 | N/A | N/A | 84616 | 84635 | CCAGAGATTTCCTCCTGCTT | 41 | 2084 |
| 1339254 | N/A | N/A | 59438 | 59457 | GCACAGTGTCTTCCAGGGCC | 19 | 2085 |
| 1339259 | N/A | N/A | 29902 | 29921 | AACATCTTTCCCTCACTCGC | 38 | 2086 |
| 1339276 | N/A | N/A | 31238 | 31257 | CTCCAGTCACTTCACCTCTT | 66 | 2087 |
| 1339313 | N/A | N/A | 31775 | 31794 | CGTGCAACATTTTCAAGCCT | 27 | 2088 |
| 1339315 | N/A | N/A | 55799 | 55818 | GCTAACCCCCACATCAGAGC | 13 | 2089 |
| 1339337 | N/A | N/A | 20702 | 20721 | CCCGCTTCCCTCACAGAGCC | 34 | 2090 |
| 1339384 | N/A | N/A | 79649 | 79668 | GAGAGTCCCCCTTTTTAGGA | 54 | 2091 |
| 1339435 | N/A | N/A | 86354 | 86373 | CACCACATGACCCACAGGCA | 35 | 2092 |
| 1339438 | N/A | N/A | 70303 | 70322 | ACGGGCATCCTTGTGTGCCC | 75 | 2093 |
| 1339441 | N/A | N/A | 58492 | 58511 | CACGGAACCCCTCTCAGCAC | 55 | 2094 |
| 1339442 | N/A | N/A | 27326 | 27345 | CTTGAGATCCTCAACTAATC | 65 | 2095 |
| 1339493 | N/A | N/A | 62162 | 62181 | GCTGTCCACCTTGACCCTTC | 17 | 2096 |
| 1339536 | N/A | N/A | 19931 | 19950 | CATTGTTGCCCACCCATTCC | 64 | 2097 |
| 1339539 | N/A | N/A | 54967 | 54986 | ACCATCTGCTCATCATCCAT | 37 | 2098 |
| 1339631 | N/A | N/A | 39470 | 39489 | ATCCTCATTTCCCCCGCAGC | 61 | 2099 |

TABLE 28
Reduction of KCNT1 RNA by 4,000 nM 5-10-5 MOE gapmers with a
mixed backbone measured with human KCNT1 primer probe set RTS39496

| | SEQ | SEQ | SEQ | SEQ | | | |
|---|---|---|---|---|---|---|---|
| | ID | ID | ID | ID | | | |
| | NO: 1 | NO: 1 | NO: 2 | NO: 2 | | | SEQ |
| Compound | Start | Stop | Start | Stop | | KCNT1 | ID |
| Number | Site | Site | Site | Site | Sequence (5′ to 3′) | (% UTC) | No. |
| 1080855 | 3854 | 3873 | 94233 | 94252 | GTCACGCTAGTGCCACCGTG | 19 | 283 |
| 1337230 | N/A | N/A | 54962 | 54981 | CTGCTCATCATCCATCCACT | 20 | 2100 |
| 1337282 | 3855 | 3874 | 94234 | 94253 | GGTCACGCTAGTGCCACCGT | 16 | 2101 |
| 1337399 | 4575 | 4594 | 94954 | 94973 | TGAATTGTGCTTCACAAGTC | 16 | 2102 |
| 1337419 | N/A | N/A | 83141 | 83160 | CCAGGACTGTTCACTGCTCT | 53 | 2103 |
| 1337435 | N/A | N/A | 31774 | 31793 | GTGCAACATTTTCAAGCCTC | 31 | 2104 |
| 1337450 | N/A | N/A | 17765 | 17784 | ACCCCCTTTTTACAAATCTT | 67 | 2105 |
| 1337456 | N/A | N/A | 78743 | 78762 | CGAGCATCAGAATCAATAAC | 32 | 2106 |
| 1337477 | N/A | N/A | 23912 | 23931 | CGGGAGCCACAGTCTCCACA | 32 | 2107 |
| 1337498 | N/A | N/A | 48849 | 48868 | GATGTTTCTTCCCTCTGACC | 62 | 2108 |
| 1337525 | N/A | N/A | 58491 | 58510 | ACGGAACCCCTCTCAGCACA | 43 | 2109 |
| 1337532 | N/A | N/A | 79502 | 79521 | AGGAGCCTCACTTGTTGTCC | 48 | 2110 |
| 1337569 | N/A | N/A | 33858 | 33877 | GGATGCATTCCATCCAGATA | 55 | 2111 |
| 1337623 | N/A | N/A | 23035 | 23054 | CCTCCTCGAACCTTCACGGC | 35 | 2112 |
| 1337628 | N/A | N/A | 27855 | 27874 | TTTTCCGGCATTTCTGCTTT | 41 | 2113 |
| 1337637 | N/A | N/A | 86322 | 86341 | GCCTTTTCTAAGAAAACTCC | 13 | 2114 |
| 1337645 | N/A | N/A | 62155 | 62174 | ACCTTGACCCTTCCCTGCAC | 49 | 2115 |
| 1337656 | N/A | N/A | 27323 | 27342 | GAGATCCTCAACTAATCACA | 42 | 2116 |
| 1337660 | N/A | N/A | 18250 | 18269 | CCCCAGGCACCATTAGGCGG | 17 | 2117 |
| 1337672 | N/A | N/A | 75838 | 75857 | TCTTACCCACATACTTGTCC | 59 | 2118 |
| 1337675 | N/A | N/A | 21695 | 21714 | CGAAGCTTCCTCTTGCCTGC | 48 | 2119 |
| 1337736 | N/A | N/A | 91724 | 91743 | GACCCTCCGACCTTTACTCC | 38 | 2120 |
| 1337782 | N/A | N/A | 22319 | 22338 | GCAGGGCTGTTCCTAGAGAC | 49 | 2121 |
| 1337799 | N/A | N/A | 70294 | 70313 | CTTGTGTGCCCTCCACCAGC | 61 | 2122 |
| 1337810 | N/A | N/A | 35080 | 35099 | GGCAGGTCAGCATCACAGAC | 47 | 2123 |
| 1337822 | N/A | N/A | 32400 | 32419 | AAGGCCCTCCACTTAATCAT | 43 | 2124 |
| 1337828 | N/A | N/A | 84414 | 84433 | GAGGAGAGATCACACAGGCT | 19 | 2125 |
| 1337847 | N/A | N/A | 24885 | 24904 | CTGAATTGCACCCCCAGATT | 34 | 2126 |
| 1337870 | N/A | N/A | 63256 | 63275 | GAGGCGAGCTTTACACTTTT | 7 | 2127 |
| 1337883 | N/A | N/A | 61120 | 61139 | CATGGATGCCCCAATCTGCC | 21 | 2128 |
| 1337901 | N/A | N/A | 40883 | 40902 | CTGACCCCACCACTGAAGCC | 50 | 2129 |
| 1337926 | N/A | N/A | 89852 | 89871 | GCGGGATCATCCTCTGCCAG | 33 | 2130 |
| 1337939 | N/A | N/A | 42514 | 42533 | GGGCCATCCCCACTTGACTT | 49 | 2131 |
| 1337941 | N/A | N/A | 82116 | 82135 | GTCAGCCAGATATCAAGGCA | 35 | 2132 |
| 1337944 | N/A | N/A | 51997 | 52016 | GACTTCTTCCAACTTTCCAA | 38 | 2133 |
| 1337987 | N/A | N/A | 20637 | 20656 | GCTGAGCCCCCACATTGCAC | 47 | 2134 |
| 1338032 | N/A | N/A | 48166 | 48185 | CCAGAGACATTAATGAAGCC | 52 | 2135 |
| 1338126 | N/A | N/A | 71273 | 71292 | CCAGACGCACCATCACCCAA | 36 | 2136 |
| 1338166 | 4341 | 4360 | 94720 | 94739 | CCCGGGCCCTTTGCTGCTTC | 30 | 2137 |
| 1338174 | N/A | N/A | 26605 | 26624 | TCTGACAGTCATATTTAACC | 42 | 2138 |
| 1338227 | N/A | N/A | 40376 | 40395 | CCCTACTCATCTCAGCGCGA | 40 | 2139 |
| 1338247 | N/A | N/A | 29901 | 29920 | ACATCTTTCCCTCACTCGCC | 35 | 2140 |
| 1338262 | N/A | N/A | 53642 | 53661 | AGCAGCCGCCACTTCTCGAA | 35 | 2141 |
| 1338404 | N/A | N/A | 33203 | 33222 | GAGTGTGGAAAATCTAGTTT | 34 | 2142 |
| 1338405 | N/A | N/A | 76773 | 76792 | CTCGGCATAACACATGGCCC | 39 | 2143 |
| 1338441 | N/A | N/A | 74546 | 74565 | AGTTTCCCCCTCCATACAAC | 38 | 2144 |
| 1338457 | N/A | N/A | 49556 | 49575 | CCGCCGTCTTTCTCTCTGAA | 56 | 2145 |
| 1338509 | N/A | N/A | 50599 | 50618 | TAAGCACCAGCCTAACCCCT | 43 | 2146 |
| 1338531 | N/A | N/A | 19930 | 19949 | ATTGTTGCCCACCCATTCCA | 60 | 2147 |
| 1338594 | N/A | N/A | 91102 | 91121 | GGTCCGAGCACCACAGTGCC | 43 | 2148 |
| 1338598 | N/A | N/A | 36772 | 36791 | CTCGCTCACATTCCCTGGGA | 33 | 2149 |
| 1338600 | N/A | N/A | 92916 | 92935 | CAGGGTAGCCCTGCCAAGCA | 35 | 2150 |
| 1338605 | N/A | N/A | 16882 | 16901 | AGATGCTTCCCCCTGCCCGC | 31 | 2151 |
| 1338617 | N/A | N/A | 56498 | 56517 | ACCAGGCACCCCAGTTGCCC | 35 | 2152 |
| 1338630 | N/A | N/A | 65410 | 65429 | GGATACTTCCAGGAGACCCA | 9 | 2153 |
| 1338633 | N/A | N/A | 59373 | 59392 | CCCCGGCTTACAATCATGTT | 70 | 2154 |
| 1338785 | N/A | N/A | 55798 | 55817 | CTAACCCCCACATCAGAGCT | 19 | 2155 |
| 1338919 | N/A | N/A | 43834 | 43853 | CAGAGGGACCTCTCTCTTTT | 53 | 2156 |
| 1339000 | N/A | N/A | 68995 | 69014 | TCCAGGTAATAATATACTCT | 13 | 2157 |
| 1339041 | N/A | N/A | 87983 | 88002 | CTGGTTTCCTCCTGAGCACA | 11 | 2158 |
| 1339062 | N/A | N/A | 68444 | 68463 | CCCTGATGATCTACCCCAGA | 61 | 2159 |
| 1339064 | N/A | N/A | 31171 | 31190 | AGACGCAGCCCACTCGGATA | 48 | 2160 |
| 1339092 | 1126 | 1145 | 67047 | 67066 | CTGCCGCTCCATCCAGAGGT | 15 | 2161 |
| 1339123 | N/A | N/A | 30774 | 30793 | CCAGACCCGGCAAAACACTC | 32 | 2162 |
| 1339152 | N/A | N/A | 19239 | 19258 | GAGCCAGGTCCCCTTCCCTC | 8 | 2163 |
| | | | 19285 | 19304 | | | |
| 1339185 | N/A | N/A | 37579 | 37598 | CCAAACTCACACCAGAAGCC | 53 | 2164 |
| 1339247 | N/A | N/A | 67992 | 68011 | ATGGTCCACCTAAATGGTCC | 15 | 2165 |
| 1339261 | N/A | N/A | 72769 | 72788 | TCCTGCAAATCACCAGAGTC | 36 | 2166 |
| 1339286 | N/A | N/A | 39468 | 39487 | CCTCATTTCCCCCGCAGCAT | 18 | 2167 |
| 1339304 | N/A | N/A | 85511 | 85530 | GCTCCCGTAACAAATGACCG | 39 | 2168 |
| 1339344 | N/A | N/A | 45813 | 45832 | GCCCCCCCATAGCTTGGCCA | 53 | 2169 |
| 1339401 | N/A | N/A | 57485 | 57504 | GGGTCCCTGTTTACTGATCC | 8 | 2170 |
| 1339402 | N/A | N/A | 77771 | 77790 | TCAGACACCCATGCCGGGCC | 38 | 2171 |
| 1339409 | N/A | N/A | 87154 | 87173 | GGCTGCCCGTATTCTTCCTG | 9 | 2172 |
| 1339512 | N/A | N/A | 45197 | 45216 | CCGAGAGCGCATCCCAGCTC | 37 | 2173 |
| 1339514 | N/A | N/A | 93365 | 93384 | GCAGATTCACCTCTGTATTC | 20 | 2174 |
| 1339520 | N/A | N/A | 18696 | 18715 | TCCAGCGGTCCACCTCCTAA | 28 | 2175 |
| 1339532 | N/A | N/A | 47165 | 47184 | GTGTCCATTCTCATCCACTC | 14 | 2176 |

TABLE 29
Reduction of KCNT1 RNA by 4,000 nM 5-10-5 MOE gapmers with a
mixed backbone measured with human KCNT1 primer probe set RTS39496

| | SEQ | SEQ | SEQ | SEQ | | | |
|---|---|---|---|---|---|---|---|
| | ID | ID | ID | ID | | | |
| | NO: 1 | NO: 1 | NO: 2 | NO: 2 | | | SEQ |
| Compound | Start | Stop | Start | Stop | | KCNT1 | ID |
| Number | Site | Site | Site | Site | Sequence (5′ to 3′) | (% UTC) | No. |
| 1080855 | 3854 | 3873 | 94233 | 94252 | GTCACGCTAGTGCCACCGTG | 21 | 283 |
| 1081135 | N/A | N/A | 87153 | 87172 | GCTGCCCGTATTCTTCCTGA | 11 | 174 |
| 1337221 | N/A | N/A | 74540 | 74559 | CCCCTCCATACAACAGGGAC | 20 | 2177 |
| 1337286 | N/A | N/A | 43832 | 43851 | GAGGGACCTCTCTCTTTTAA | 31 | 2178 |
| 1337375 | N/A | N/A | 26604 | 26623 | CTGACAGTCATATTTAACCA | 18 | 2179 |
| 1337380 | N/A | N/A | 49350 | 49369 | GCTTAGGAACCCACCCTCCC | 42 | 2180 |
| 1337432 | N/A | N/A | 82115 | 82134 | TCAGCCAGATATCAAGGCAA | 22 | 2181 |
| 1337433 | N/A | N/A | 50597 | 50616 | AGCACCAGCCTAACCCCTGT | 33 | 2182 |
| 1337481 | N/A | N/A | 87975 | 87994 | CTCCTGAGCACAGATCGCCG | 18 | 2183 |
| 1337541 | N/A | N/A | 84309 | 84328 | GGAGAGACTCCTCTCACACA | 29 | 2184 |
| 1337599 | N/A | N/A | 45703 | 45722 | ACGGCGGCACACACTATAGC | 57 | 2185 |
| 1337664 | N/A | N/A | 40882 | 40901 | TGACCCCACCACTGAAGCCA | 40 | 2186 |
| 1337706 | N/A | N/A | 27835 | 27854 | CCAGCATATATTCAATCAAC | 15 | 2187 |
| 1337715 | N/A | N/A | 27322 | 27341 | AGATCCTCAACTAATCACAT | 14 | 2188 |
| 1337721 | N/A | N/A | 48848 | 48867 | ATGTTTCTTCCCTCTGACCT | 39 | 2189 |
| 1337783 | N/A | N/A | 47164 | 47183 | TGTCCATTCTCATCCACTCA | 10 | 2190 |
| 1337802 | N/A | N/A | 76772 | 76791 | TCGGCATAACACATGGCCCC | 43 | 2191 |
| 1337892 | N/A | N/A | 37541 | 37560 | TGTTCCCCCACCCTGAATCC | 52 | 2192 |
| 1337918 | N/A | N/A | 91723 | 91742 | ACCCTCCGACCTTTACTCCA | 28 | 2193 |
| 1337940 | 3851 | 3870 | 94230 | 94249 | ACGCTAGTGCCACCGTGTCC | 8 | 2194 |
| 1337954 | N/A | N/A | 17764 | 17783 | CCCCCTTTTTACAAATCTTC | 20 | 2195 |
| 1337968 | N/A | N/A | 75837 | 75856 | CTTACCCACATACTTGTCCA | 59 | 2196 |
| 1337972 | N/A | N/A | 68982 | 69001 | ATACTCTTGTTACCTTGTCA | 9 | 2197 |
| 1338045 | N/A | N/A | 36771 | 36790 | TCGCTCACATTCCCTGGGAA | 8 | 2198 |
| 1338058 | N/A | N/A | 42499 | 42518 | GACTTGTGCCCATAAGGAGC | 38 | 2199 |
| 1338111 | N/A | N/A | 33073 | 33092 | GACAATGATTCAAACATGGC | 20 | 2200 |
| 1338157 | N/A | N/A | 57435 | 57454 | GGTCAGTAAATGCTGGGTTT | 46 | 2201 |
| | | | 57977 | 57996 | | | |
| 1338190 | N/A | N/A | 63255 | 63274 | AGGCGAGCTTTACACTTTTA | 5 | 2202 |
| 1338234 | N/A | N/A | 18233 | 18252 | CGGATGGACACCACTTCCTG | 34 | 2203 |
| 1338286 | N/A | N/A | 70290 | 70309 | TGTGCCCTCCACCAGCAGGC | 19 | 2204 |
| 1338306 | N/A | N/A | 72768 | 72787 | CCTGCAAATCACCAGAGTCC | 16 | 2205 |
| 1338309 | N/A | N/A | 22308 | 22327 | CCTAGAGACATCCCCACCGC | 41 | 2206 |
| 1338345 | N/A | N/A | 71272 | 71291 | CAGACGCACCATCACCCAAC | 25 | 2207 |
| 1338346 | N/A | N/A | 21649 | 21668 | CTTCCTGGCACCTCTCATGT | 58 | 2208 |
| 1338385 | N/A | N/A | 78741 | 78760 | AGCATCAGAATCAATAACGA | 29 | 2209 |
| 1338386 | N/A | N/A | 45196 | 45215 | CGAGAGCGCATCCCAGCTCC | 28 | 2210 |
| 1338510 | N/A | N/A | 53583 | 53602 | AGCAAGTTCCCACCCACCCT | 11 | 2211 |
| 1338526 | N/A | N/A | 86315 | 86334 | CTAAGAAAACTCCCTTGCCA | 41 | 2212 |
| 1338570 | N/A | N/A | 19226 | 19245 | TTCCCTCTCATCCTATAGAC | 27 | 2213 |
| | | | 19272 | 19291 | | | |
| 1338597 | N/A | N/A | 66872 | 66891 | GGGCCTTTCCCACATGGAAA | 20 | 2214 |
| 1338620 | N/A | N/A | 19929 | 19948 | TTGTTGCCCACCCATTCCAG | 26 | 2215 |
| 1338652 | N/A | N/A | 55797 | 55816 | TAACCCCCACATCAGAGCTC | 12 | 2216 |
| 1338669 | 4574 | 4593 | 94953 | 94972 | GAATTGTGCTTCACAAGTCA | 17 | 2217 |
| 1338693 | 4334 | 4353 | 94713 | 94732 | CCTTTGCTGCTTCTAACTTC | 12 | 2218 |
| 1338715 | N/A | N/A | 93364 | 93383 | CAGATTCACCTCTGTATTCC | 16 | 2219 |
| 1338770 | N/A | N/A | 39360 | 39379 | TGCTGTGTCCCACCCTGAGC | 23 | 2220 |
| 1338821 | N/A | N/A | 51951 | 51970 | AGCAGGACCACTCCCTCCAC | 49 | 2221 |
| 1338850 | N/A | N/A | 89851 | 89870 | CGGGATCATCCTCTGCCAGC | 12 | 2222 |
| 1338875 | N/A | N/A | 92886 | 92905 | GAGGCCACCATCCCAGCAGT | 46 | 2223 |
| 1338925 | N/A | N/A | 58477 | 58496 | AGCACAGGCATCTACTGACC | 11 | 2224 |
| 1338947 | N/A | N/A | 33857 | 33876 | GATGCATTCCATCCAGATAT | 23 | 2225 |
| 1338994 | N/A | N/A | 54492 | 54511 | GGGATGTGAAACCAGAAGCC | 5 | 2226 |
| 1339068 | N/A | N/A | 62100 | 62119 | ACTGGAGACCCACCATCTCC | 14 | 2227 |
| 1339071 | N/A | N/A | 35078 | 35097 | CAGGTCAGCATCACAGACCT | 47 | 2228 |
| 1339122 | N/A | N/A | 20636 | 20655 | CTGAGCCCCCACATTGCACC | 42 | 2229 |
| 1339132 | N/A | N/A | 65402 | 65421 | CCAGGAGACCCAGCCGGCGC | 29 | 2230 |
| 1339176 | N/A | N/A | 30772 | 30791 | AGACCCGGCAAAACACTCCT | 27 | 2231 |
| 1339183 | N/A | N/A | 91101 | 91120 | GTCCGAGCACCACAGTGCCC | 24 | 2232 |
| 1339188 | 246 | 265 | 16638 | 16657 | AAGGGCAGCACCTCGGAGTC | 9 | 2233 |
| 1339255 | N/A | N/A | 61118 | 61137 | TGGATGCCCCAATCTGCCCA | 10 | 2234 |
| 1339279 | N/A | N/A | 68440 | 68459 | GATGATCTACCCCAGAGGAC | 35 | 2235 |
| 1339293 | N/A | N/A | 56480 | 56499 | CCCGCAGTCACCTCCCACTG | 21 | 2236 |
| 1339333 | N/A | N/A | 67983 | 68002 | CTAAATGGTCCATCCCAGAA | 49 | 2237 |
| | | | 68122 | 68141 | | | |
| 1339359 | N/A | N/A | 77748 | 77767 | GTCCCTGTCCTAATGAGCTG | 15 | 2238 |
| 1339428 | N/A | N/A | 18695 | 18714 | CCAGCGGTCCACCTCCTAAT | 20 | 2239 |
| 1339433 | N/A | N/A | 23034 | 23053 | CTCCTCGAACCTTCACGGCC | 18 | 2240 |
| 1339462 | N/A | N/A | 85508 | 85527 | CCCGTAACAAATGACCGCAA | 18 | 2241 |
| 1339534 | N/A | N/A | 29900 | 29919 | CATCTTTCCCTCACTCGCCT | 21 | 2242 |
| 1339542 | N/A | N/A | 31764 | 31783 | TTCAAGCCTCGATCAAGTAA | 39 | 2243 |
| 1339547 | N/A | N/A | 48121 | 48140 | CTGTGGCCGCCCACTTCTCC | 20 | 2244 |
| 1339561 | N/A | N/A | 24881 | 24900 | ATTGCACCCCCAGATTCCCT | 26 | 2245 |
| 1339584 | N/A | N/A | 31170 | 31189 | GACGCAGCCCACTCGGATAA | 43 | 2246 |
| 1339590 | N/A | N/A | 59372 | 59391 | CCCGGCTTACAATCATGTTT | 49 | 2247 |
| 1339612 | 2552 | 2571 | 79466 | 79485 | GGTTCAGCTCCTTGCGGGAT | 5 | 2248 |
| 1339637 | N/A | N/A | 82970 | 82989 | GCTTGCTGACCCAAACTTCA | 26 | 2249 |
| 1339640 | N/A | N/A | 32399 | 32418 | AGGCCCTCCACTTAATCATA | 43 | 2250 |
| 1339651 | N/A | N/A | 40308 | 40327 | GGCAGCAGCTCCATTACCTC | 36 | 2251 |
| 1339657 | N/A | N/A | 23907 | 23926 | GCCACAGTCTCCACAGCAGA | 50 | 2252 |

TABLE 30
Reduction of KCNT1 RNA by 4,000 nM 5-10-5 MOE gapmers with a mixed backbone measured
with human KCNT1 primer probe set RTS39496

| | SEQ | SEQ | SEQ | SEQ | | | |
|---|---|---|---|---|---|---|---|
| | ID | ID | ID | ID | | | |
| | NO: 1 | NO: 1 | NO: 2 | NO: 2 | | KCNT1 | SEQ |
| Compound | Start | Stop | Start | Stop | | (% | ID |
| Number | Site | Site | Site | Site | Sequence (5′ to 3′) | UTC) | No. |
| 1080855 | 3854 | 3873 | 94233 | 94252 | GTCACGCTAGTGCCACCGTG | 22 | 283 |
| 1337225 | N/A | N/A | 23025 | 23044 | CCTTCACGGCCCCTAAACCA | 71 | 2253 |
| 1337252 | N/A | N/A | 91074 | 91093 | CGAGGGTCTTCCATGAGCGC | 21 | 2254 |
| 1337257 | N/A | N/A | 29891 | 29910 | CTCACTCGCCTTTTTAGAGC | 56 | 2255 |
| 1337260 | N/A | N/A | 22307 | 22326 | CTAGAGACATCCCCACCGCA | 80 | 2256 |
| 1337265 | 2551 | 2570 | 79465 | 79484 | GTTCAGCTCCTTGCGGGATC | 18 | 2257 |
| 1337296 | N/A | N/A | 37528 | 37547 | TGAATCCCCCCACCCTTGGC | 70 | 2258 |
| 1337389 | N/A | N/A | 45047 | 45066 | GCTGCGGACCACCCACCTCT | 81 | 2259 |
| 1337415 | N/A | N/A | 27295 | 27314 | GACCGTGTTTCTACATAAGC | 40 | 2260 |
| 1337497 | N/A | N/A | 74473 | 74492 | CCAGTGCCCCATCGGTGCCA | 43 | 2261 |
| 1337572 | N/A | N/A | 57286 | 57305 | TTCTTAGCATTTACTGAGAC | 52 | 2262 |
| 1337613 | N/A | N/A | 48115 | 48134 | CCGCCCACTTCTCCGAGCAC | 54 | 2263 |
| 1337627 | 3849 | 3868 | 94228 | 94247 | GCTAGTGCCACCGTGTCCTC | 17 | 2264 |
| 1337650 | N/A | N/A | 54491 | 54510 | GGATGTGAAACCAGAAGCCC | 31 | 2265 |
| 1337830 | N/A | N/A | 20635 | 20654 | TGAGCCCCCACATTGCACCT | 27 | 2266 |
| 1337858 | N/A | N/A | 75833 | 75852 | CCCACATACTTGTCCAGCCA | 37 | 2267 |
| 1337861 | N/A | N/A | 61117 | 61136 | GGATGCCCCAATCTGCCCAC | 28 | 2268 |
| 1337867 | 762 | 781 | 59310 | 59329 | ATGAACAGGTTCCGCAGCGG | 18 | 2269 |
| 1337889 | N/A | N/A | 32397 | 32416 | GCCCTCCACTTAATCATATC | 59 | 2270 |
| 1337891 | N/A | N/A | 14709 | 14728 | CTGTTGTGTTGGCTGAGGGC | 91 | 2271 |
| | | | 14747 | 14766 | | | |
| 1337904 | N/A | N/A | 27834 | 27853 | CAGCATATATTCAATCAACT | 39 | 2272 |
| 1337963 | N/A | N/A | 62099 | 62118 | CTGGAGACCCACCATCTCCC | 37 | 2273 |
| 1337970 | N/A | N/A | 63252 | 63271 | CGAGCTTTACACTTTTAGAA | 12 | 2274 |
| 1338001 | N/A | N/A | 24860 | 24879 | GTTGAAGCCCCCACCGCTGA | 79 | 2275 |
| 1338006 | N/A | N/A | 86311 | 86330 | GAAAACTCCCTTGCCAGGCA | 38 | 2276 |
| 1338016 | N/A | N/A | 40866 | 40885 | GCCACGCTGTCTAATCAGCT | 25 | 2277 |
| 1338034 | N/A | N/A | 77665 | 77684 | GTGGCTCCAACCTGTTCTCA | 41 | 2278 |
| 1338102 | N/A | N/A | 55796 | 55815 | AACCCCCACATCAGAGCTCT | 40 | 2279 |
| 1338156 | N/A | N/A | 67982 | 68001 | TAAATGGTCCATCCCAGAAG | 79 | 2280 |
| | | | 68121 | 68140 | | | |
| 1338186 | N/A | N/A | 76764 | 76783 | ACACATGGCCCCATACAGGC | 51 | 2281 |
| 1338258 | N/A | N/A | 51950 | 51969 | GCAGGACCACTCCCTCCACC | 62 | 2282 |
| 1338273 | N/A | N/A | 72767 | 72786 | CTGCAAATCACCAGAGTCCC | 51 | 2283 |
| 1338319 | 4333 | 4352 | 94712 | 94731 | CTTTGCTGCTTCTAACTTCC | 16 | 2284 |
| 1338394 | N/A | N/A | 17763 | 17782 | CCCCTTTTTACAAATCTTCA | 23 | 2285 |
| 1338436 | N/A | N/A | 18694 | 18713 | CAGCGGTCCACCTCCTAATA | 65 | 2286 |
| 1338494 | N/A | N/A | 19225 | 19244 | TCCCTCTCATCCTATAGACA | 42 | 2287 |
| | | | 19271 | 19290 | | | |
| 1338501 | N/A | N/A | 82966 | 82985 | GCTGACCCAAACTTCAAGCC | 35 | 2288 |
| 1338524 | N/A | N/A | 33854 | 33873 | GCATTCCATCCAGATATGGC | 17 | 2289 |
| 1338532 | N/A | N/A | 92794 | 92813 | CTGGATTCCTGTTCCAGGAC | 74 | 2290 |
| 1338547 | N/A | N/A | 30767 | 30786 | CGGCAAAACACTCCTGGATT | 70 | 2291 |
| 1338569 | N/A | N/A | 18230 | 18249 | ATGGACACCACTTCCTGCCC | 50 | 2292 |
| 1338585 | N/A | N/A | 39359 | 39378 | GCTGTGTCCCACCCTGAGCT | 41 | 2293 |
| 1338602 | N/A | N/A | 43830 | 43849 | GGGACCTCTCTCTTTTAATC | 58 | 2294 |
| 1338628 | N/A | N/A | 21648 | 21667 | TTCCTGGCACCTCTCATGTC | 89 | 2295 |
| 1338661 | N/A | N/A | 84308 | 84327 | GAGAGACTCCTCTCACACAC | 41 | 2296 |
| 1338712 | N/A | N/A | 42485 | 42504 | AGGAGCAGTCTCAGCTGCCA | 76 | 2297 |
| 1338738 | N/A | N/A | 23768 | 23787 | GGCAACACAGGCAAACCGAC | 37 | 2298 |
| 1338782 | N/A | N/A | 26547 | 26566 | CAGCAGACACTCAACTTGAC | 66 | 2299 |
| 1338820 | N/A | N/A | 36770 | 36789 | CGCTCACATTCCCTGGGAAC | 41 | 2300 |
| 1338888 | 4553 | 4572 | 94932 | 94951 | GGGTTTAGAAAATGAGGCTT | 24 | 2301 |
| 1338894 | N/A | N/A | 87152 | 87171 | CTGCCCGTATTCTTCCTGAA | 19 | 2302 |
| 1338921 | N/A | N/A | 40307 | 40326 | GCAGCAGCTCCATTACCTCT | 51 | 2303 |
| 1338928 | N/A | N/A | 82102 | 82121 | AAGGCAACAGCAACAGTGCC | 41 | 2304 |
| 1338958 | N/A | N/A | 31747 | 31766 | TAAGCTCTGTCCAGCAGGCC | 27 | 2305 |
| 1338962 | N/A | N/A | 19927 | 19946 | GTTGCCCACCCATTCCAGCA | 27 | 2306 |
| 1338974 | N/A | N/A | 65338 | 65357 | ATCACTCTGCTTCAAGGGCT | 23 | 2307 |
| 1338985 | N/A | N/A | 58476 | 58495 | GCACAGGCATCTACTGACCC | 26 | 2308 |
| 1339002 | N/A | N/A | 93354 | 93373 | TCTGTATTCCACACACATTT | 29 | 2309 |
| 1339020 | N/A | N/A | 91722 | 91741 | CCCTCCGACCTTTACTCCAG | 30 | 2310 |
| 1339113 | N/A | N/A | 48805 | 48824 | CTGGCCACTCCTCCTAGGCG | 46 | 2311 |
| 1339140 | N/A | N/A | 70224 | 70243 | CCCGCAGGCATCCTGGGCCT | 55 | 2312 |
| 1339148 | N/A | N/A | 50595 | 50614 | CACCAGCCTAACCCCTGTTC | 65 | 2313 |
| 1339154 | N/A | N/A | 49317 | 49336 | CTGTCCCGCCCTCCATGGCA | 41 | 2314 |
| 1339175 | N/A | N/A | 71271 | 71290 | AGACGCACCATCACCCAACA | 48 | 2315 |
| 1339195 | N/A | N/A | 68966 | 68985 | GTCACTCTGTCAATTTGTCT | 5 | 2316 |
| 1339241 | N/A | N/A | 89763 | 89782 | CGTGAAGTCCCTCCCGGGAC | 25 | 2317 |
| 1339256 | N/A | N/A | 33038 | 33057 | TGCTGTGGTTACAAATGACC | 61 | 2318 |
| 1339282 | N/A | N/A | 53582 | 53601 | GCAAGTTCCCACCCACCCTC | 32 | 2319 |
| 1339299 | N/A | N/A | 56479 | 56498 | CCGCAGTCACCTCCCACTGC | 32 | 2320 |
| 1339302 | N/A | N/A | 68439 | 68458 | ATGATCTACCCCAGAGGACC | 51 | 2321 |
| 1339303 | N/A | N/A | 85496 | 85515 | GACCGCAAACTTAGCAGCTA | 55 | 2322 |
| 1339335 | N/A | N/A | 87908 | 87927 | GAGGGCAGCTCCCTTCGCCT | 16 | 2323 |
| 1339350 | N/A | N/A | 35077 | 35096 | AGGTCAGCATCACAGACCTC | 70 | 2324 |
| 1339550 | N/A | N/A | 45702 | 45721 | CGGCGGCACACACTATAGCC | 60 | 2325 |
| 1339570 | N/A | N/A | 78737 | 78756 | TCAGAATCAATAACGATCTG | 43 | 2326 |
| 1339643 | N/A | N/A | 66663 | 66682 | CTTCCAGGCACTCGCAGGCC | 6 | 2327 |
| 1339654 | N/A | N/A | 47163 | 47182 | GTCCATTCTCATCCACTCAT | 48 | 2328 |
| 1339667 | N/A | N/A | 31156 | 31175 | GGATAATCGCCCTTTGATTA | 40 | 2329 |

TABLE 31
Reduction of KCNT1 RNA by 4,000 nM 5-10-5 MOE gapmers with a mixed backbone measured
with human KCNT1 primer probe set RTS39496

| | SEQ | SEQ | SEQ | SEQ | | | |
|---|---|---|---|---|---|---|---|
| | ID | ID | ID | ID | | | |
| | NO: 1 | NO: 1 | NO: 2 | NO: 2 | | KCNT1 | SEQ |
| Compound | Start | Stop | Start | Stop | | (% | ID |
| Number | Site | Site | Site | Site | Sequence (5′ to 3′) | UTC) | No. |
| 1080740 | 760 | 779 | 59308 | 59327 | GAACAGGTTCCGCAGCGGCG | 16 | 108 |
| 1080818 | 2550 | 2569 | 79464 | 79483 | TTCAGCTCCTTGCGGGATCT | 15 | 199 |
| 1080855 | 3854 | 3873 | 94233 | 94252 | GTCACGCTAGTGCCACCGTG | 24 | 283 |
| 1337292 | N/A | N/A | 27293 | 27312 | CCGTGTTTCTACATAAGCCA | 30 | 2330 |
| 1337355 | N/A | N/A | 85488 | 85507 | ACTTAGCAGCTAAAACGACA | 39 | 2331 |
| 1337395 | N/A | N/A | 18228 | 18247 | GGACACCACTTCCTGCCCAA | 24 | 2332 |
| 1337396 | N/A | N/A | 22306 | 22325 | TAGAGACATCCCCACCGCAA | 72 | 2333 |
| 1337405 | N/A | N/A | 55795 | 55814 | ACCCCCACATCAGAGCTCTA | 30 | 2334 |
| 1337448 | N/A | N/A | 77630 | 77649 | CAGGTGCCTCTAACATAGAC | 66 | 2335 |
| 1337460 | N/A | N/A | 87862 | 87881 | GGCCTGGGACCCATCTGGAC | 17 | 2336 |
| 1337471 | N/A | N/A | 27833 | 27852 | AGCATATATTCAATCAACTT | 71 | 2337 |
| 1337475 | N/A | N/A | 35075 | 35094 | GTCAGCATCACAGACCTCCT | 59 | 2338 |
| 1337514 | N/A | N/A | 67981 | 68000 | AAATGGTCCATCCCAGAAGG | 41 | 2339 |
| | | | 68120 | 68139 | | | |
| 1337518 | N/A | N/A | 57207 | 57226 | CCTCAGTGCTTACTGAGCAC | 17 | 2340 |
| 1337571 | N/A | N/A | 92789 | 92808 | TTCCTGTTCCAGGACTCCAA | 30 | 2341 |
| 1337657 | 4540 | 4559 | 94919 | 94938 | GAGGCTTTGCTTTAAAAGGT | 16 | 2342 |
| 1337769 | N/A | N/A | 40865 | 40884 | CCACGCTGTCTAATCAGCTC | 36 | 2343 |
| 1337773 | N/A | N/A | 43829 | 43848 | GGACCTCTCTCTTTTAATCC | 55 | 2344 |
| 1337792 | N/A | N/A | 29888 | 29907 | ACTCGCCTTTTTAGAGCCCT | 19 | 2345 |
| 1337835 | N/A | N/A | 42403 | 42422 | GTGGAGTGTCCCTCTGCACC | 36 | 2346 |
| 1337879 | N/A | N/A | 66524 | 66543 | CAGATCCAAAACAGAGGCCA | 48 | 2347 |
| 1337887 | N/A | N/A | 90968 | 90987 | GGCATTGTGGCAAACAGGTC | 21 | 2348 |
| 1337894 | N/A | N/A | 31729 | 31748 | CCTGCAGACCCAACTTCCAC | 43 | 2349 |
| 1337938 | N/A | N/A | 53575 | 53594 | CCCACCCACCCTCATCGCGG | 46 | 2350 |
| 1337982 | N/A | N/A | 65337 | 65356 | TCACTCTGCTTCAAGGGCTT | 15 | 2351 |
| 1338074 | N/A | N/A | 84307 | 84326 | AGAGACTCCTCTCACACACC | 38 | 2352 |
| 1338080 | N/A | N/A | 82964 | 82983 | TGACCCAAACTTCAAGCCAC | 61 | 2353 |
| 1338112 | N/A | N/A | 23024 | 23043 | CTTCACGGCCCCTAAACCAC | 73 | 2354 |
| 1338114 | N/A | N/A | 68946 | 68965 | TTAAAAGGAACTCTACCTTC | 64 | 2355 |
| 1338127 | N/A | N/A | 26546 | 26565 | AGCAGACACTCAACTTGACC | 47 | 2356 |
| 1338140 | N/A | N/A | 76763 | 76782 | CACATGGCCCCATACAGGCA | 42 | 2357 |
| 1338155 | N/A | N/A | 72765 | 72784 | GCAAATCACCAGAGTCCCCA | 37 | 2358 |
| 1338217 | N/A | N/A | 58468 | 58487 | ATCTACTGACCCCTCTGGAA | 73 | 2359 |
| 1338241 | N/A | N/A | 18693 | 18712 | AGCGGTCCACCTCCTAATAC | 28 | 2360 |
| 1338297 | N/A | N/A | 56478 | 56497 | CGCAGTCACCTCCCACTGCC | 69 | 2361 |
| 1338302 | N/A | N/A | 93327 | 93346 | TGCACAGATCTTCATAGCAA | 23 | 2362 |
| 1338338 | N/A | N/A | 49280 | 49299 | GGTCTGCTCACCTCACTTGC | 32 | 2363 |
| 1338360 | N/A | N/A | 68424 | 68443 | GGACCAACCCCAGATGGTCC | 82 | 2364 |
| 1338366 | N/A | N/A | 40305 | 40324 | AGCAGCTCCATTACCTCTGC | 20 | 2365 |
| 1338368 | N/A | N/A | 17758 | 17777 | TTTTACAAATCTTCATGGTC | 36 | 2366 |
| 1338410 | N/A | N/A | 30710 | 30729 | GGGAGATGTCTCTCCAAGCT | 53 | 2367 |
| 1338419 | N/A | N/A | 74436 | 74455 | GGCCTCAGCACCAGATGCCT | 66 | 2368 |
| 1338444 | N/A | N/A | 48804 | 48823 | TGGCCACTCCTCCTAGGCGG | 59 | 2369 |
| 1338496 | N/A | N/A | 51910 | 51929 | GGGTCCGTCACACCCAGCAG | 29 | 2370 |
| 1338527 | N/A | N/A | 19223 | 19242 | CCTCTCATCCTATAGACACC | 44 | 2371 |
| | | | 19269 | 19288 | | | |
| 1338610 | N/A | N/A | 21647 | 21666 | TCCTGGCACCTCTCATGTCC | 38 | 2372 |
| 1338692 | N/A | N/A | 63249 | 63268 | GCTTTACACTTTTAGAAGAA | 18 | 2373 |
| 1338740 | 3843 | 3862 | 94222 | 94241 | GCCACCGTGTCCTCACACGC | 18 | 2374 |
| 1338805 | N/A | N/A | 36757 | 36776 | TGGGAACGAACCCACAGCCC | 66 | 2375 |
| 1338851 | N/A | N/A | 82076 | 82095 | CCTGGGTTCCACACCTGACC | 33 | 2376 |
| 1338858 | N/A | N/A | 39315 | 39334 | GCGCTGCTCCACCTGCCCAA | 30 | 2377 |
| 1338873 | N/A | N/A | 48113 | 48132 | GCCCACTTCTCCGAGCACCA | 38 | 2378 |
| 1338883 | N/A | N/A | 23720 | 23739 | ATGACATGCATTTCACTCAC | 33 | 2379 |
| 1338890 | N/A | N/A | 78706 | 78725 | GCTACTGCAATGACCGGCCA | 30 | 2380 |
| 1338978 | N/A | N/A | 31138 | 31157 | TAATTCAAATTCAACTGCTC | 59 | 2381 |
| 1339012 | N/A | N/A | 89662 | 89681 | GGAAAGGTCTTCACAGGCCA | 22 | 2382 |
| 1339098 | N/A | N/A | 47161 | 47180 | CCATTCTCATCCACTCATCA | 41 | 2383 |
| 1339114 | N/A | N/A | 50594 | 50613 | ACCAGCCTAACCCCTGTTCC | 68 | 2384 |
| 1339141 | N/A | N/A | 87150 | 87169 | GCCCGTATTCTTCCTGAAGA | 27 | 2385 |
| 1339147 | N/A | N/A | 32396 | 32415 | CCCTCCACTTAATCATATCT | 43 | 2386 |
| 1339199 | N/A | N/A | 19890 | 19909 | GCCATGCCAGACTCACCCAA | 36 | 2387 |
| 1339236 | N/A | N/A | 54409 | 54428 | GCCCAGTTCTCCTTCTCAAA | 22 | 2388 |
| 1339284 | N/A | N/A | 8844 | 8863 | TCATGCTCAGAAAATGACCA | 34 | 2389 |
| | | | 37288 | 37307 | | | |
| 1339345 | N/A | N/A | 33853 | 33872 | CATTCCATCCAGATATGGCT | 44 | 2390 |
| 1339352 | N/A | N/A | 71268 | 71287 | CGCACCATCACCCAACAGCA | 37 | 2391 |
| 1339354 | N/A | N/A | 70215 | 70234 | ATCCTGGGCCTCTCCAGACT | 74 | 2392 |
| 1339364 | N/A | N/A | 20603 | 20622 | TGGTTGGGTCTCCCTGCCCC | 30 | 2393 |
| 1339374 | N/A | N/A | 75812 | 75831 | GCTGTTGTCCCCAGCAGGCC | 41 | 2394 |
| 1339440 | 4330 | 4349 | 94709 | 94728 | TGCTGCTTCTAACTTCCAGA | 24 | 2395 |
| 1339460 | N/A | N/A | 45026 | 45045 | GGGAGCCCATTTCCCAAGTT | 43 | 2396 |
| 1339494 | N/A | N/A | 86301 | 86320 | TTGCCAGGCACCCATAGGTC | 26 | 2397 |
| 1339497 | N/A | N/A | 60946 | 60965 | AGAGCAGCAACATGGAGCCC | 40 | 2398 |
| 1339499 | N/A | N/A | 62098 | 62117 | TGGAGACCCACCATCTCCCC | 46 | 2399 |
| 1339522 | N/A | N/A | 33022 | 33041 | GACCACAAATTCAATTGCTA | 43 | 2400 |
| 1339551 | N/A | N/A | 37527 | 37546 | GAATCCCCCCACCCTTGGCT | 75 | 2401 |
| 1339572 | N/A | N/A | 91721 | 91740 | CCTCCGACCTTTACTCCAGG | 17 | 2402 |
| 1339604 | N/A | N/A | 45701 | 45720 | GGCGGCACACACTATAGCCT | 43 | 2403 |
| 1339610 | N/A | N/A | 24678 | 24697 | GAGATGCTCTCACCAGGAGC | 33 | 2404 |

TABLE 32
Reduction of KCNT1 RNA by 4,000 nM 5-10-5 MOE gapmers with a mixed backbone measured
with human KCNT1 primer probe set RTS39496

| | SEQ | SEQ | SEQ | SEQ | | | |
|---|---|---|---|---|---|---|---|
| | ID | ID | ID | ID | | | |
| | NO: 1 | NO: 1 | NO: 2 | NO: 2 | | KCNT1 | SEQ |
| Compound | Start | Stop | Start | Stop | | (% | ID |
| Number | Site | Site | Site | Site | Sequence (5′ to 3′) | UTC) | No. |
| 1080855 | 3854 | 3873 | 94233 | 94252 | GTCACGCTAGTGCCACCGTG | 31 | 283 |
| 1337251 | N/A | N/A | 20547 | 20566 | GCACTTCCACCTTACCCAGA | 72 | 2405 |
| 1337284 | N/A | N/A | 31720 | 31739 | CCAACTTCCACTTTGCAAAA | 63 | 2406 |
| 1337289 | N/A | N/A | 8834 | 8853 | AAAATGACCAACTCACTGGC | 66 | 2407 |
| | | | 37278 | 37297 | | | |
| 1337328 | N/A | N/A | 36573 | 36592 | ACAAGAGAACATCTGTGCCG | 94 | 2408 |
| 1337330 | N/A | N/A | 89589 | 89608 | AGCCCAGTCACCCGTGAGCA | 28 | 2409 |
| 1337335 | N/A | N/A | 65183 | 65202 | CATCACTGTCCCAATCACCC | 96 | 2410 |
| 1337341 | N/A | N/A | 27810 | 27829 | ACACGCCCAGGCAAACCGCC | 60 | 2411 |
| 1337476 | N/A | N/A | 37491 | 37510 | CACTAGGCCTCCATGCACCC | 66 | 2412 |
| 1337531 | N/A | N/A | 91717 | 91736 | CGACCTTTACTCCAGGCCTC | 35 | 2413 |
| 1337550 | N/A | N/A | 45675 | 45694 | CAGACGCATCCATTTCCTCC | 48 | 2414 |
| 1337562 | N/A | N/A | 58399 | 58418 | TGGGACCCAGTCATGAACTA | 59 | 2415 |
| 1337635 | N/A | N/A | 54379 | 54398 | GGGTTCTGCCCTCTTCTGAC | 18 | 2416 |
| 1337643 | N/A | N/A | 42263 | 42282 | CCCACACGCAACAAAGGCAC | 70 | 2417 |
| 1337718 | N/A | N/A | 86290 | 86309 | CCATAGGTCAAAAAGGGCCC | 38 | 2418 |
| 1337735 | N/A | N/A | 40233 | 40252 | AGCGAGGCCACCCATGTGAA | 89 | 2419 |
| 1337821 | N/A | N/A | 93320 | 93339 | ATCTTCATAGCAACCCATGC | 49 | 2420 |
| 1337875 | N/A | N/A | 32682 | 32701 | CACAAGTGTTTTAAGCACAC | 42 | 2421 |
| 1337929 | N/A | N/A | 73956 | 73975 | TGCACTGAACCACCTGGTGC | 80 | 2422 |
| 1337932 | N/A | N/A | 67949 | 67968 | GGTCCACCCCAGACGATCCA | 21 | 2423 |
| | | | 68545 | 68564 | | | |
| 1337961 | N/A | N/A | 90921 | 90940 | CAGGAGGCCCTTCAAGCTCC | 36 | 2424 |
| 1337962 | N/A | N/A | 32357 | 32376 | TGTGGTCCCCCTCGCCACGC | 33 | 2425 |
| 1337980 | N/A | N/A | 68900 | 68919 | GCAGCTGACTCTCCCGCCCC | 79 | 2426 |
| 1338245 | N/A | N/A | 27211 | 27230 | CTGGAGTACTCTCCACAGAC | 69 | 2427 |
| 1338251 | N/A | N/A | 82003 | 82022 | CCACTTGCTCCACTGTGCGA | 58 | 2428 |
| 1338252 | N/A | N/A | 24541 | 24560 | GAGGCATAAACACACTTACA | 36 | 2429 |
| 1338279 | N/A | N/A | 92435 | 92454 | TCCTGTGTCCACACCTGCGG | 41 | 2430 |
| 1338347 | N/A | N/A | 62062 | 62081 | CTCACGGGACTCCATCATTA | 41 | 2431 |
| 1338379 | N/A | N/A | 19882 | 19901 | AGACTCACCCAACCCTACCA | 77 | 2432 |
| 1338384 | N/A | N/A | 25808 | 25827 | GCCGGACACCAGGCCTGCAA | 49 | 2433 |
| 1338395 | N/A | N/A | 23663 | 23682 | TTTGGACACCATCCCGGGCC | 54 | 2434 |
| 1338407 | N/A | N/A | 22295 | 22314 | CCACCGCAACCCCTTCTGCT | 84 | 2435 |
| 1338428 | 569 | 588 | 57124 | 57143 | TCTCCACCCACAGAATAGGA | 24 | 2436 |
| 1338452 | N/A | N/A | 71121 | 71140 | GCCCTGCCCCAGACGCACCG | 30 | 2437 |
| | | | 71161 | 71180 | | | |
| 1338466 | N/A | N/A | 47079 | 47098 | ACATCGCCATTCCCAGAGTC | 55 | 2438 |
| 1338490 | N/A | N/A | 78689 | 78708 | CCACAGATTATAACCCACAG | 49 | 2439 |
| 1338505 | N/A | N/A | 87843 | 87862 | CCCCAGCACATCCTGGCCTT | 43 | 2440 |
| 1338541 | N/A | N/A | 49202 | 49221 | GACCAGACCCCAGAATCTCC | 75 | 2441 |
| 1338551 | N/A | N/A | 48079 | 48098 | TGAAAACGATCCATTTTCCC | 79 | 2442 |
| 1338554 | N/A | N/A | 69862 | 69881 | CCATGGTGCTTCCTAGGGCA | 29 | 2443 |
| 1338567 | N/A | N/A | 85146 | 85165 | AGGCGGTACATCCACGGGCT | 48 | 2444 |
| 1338599 | N/A | N/A | 17735 | 17754 | ATGGATACAGTCCCTAGGAC | 19 | 2445 |
| 1338654 | N/A | N/A | 51867 | 51886 | TCTGAAGATTCCTCCCCGCA | 80 | 2446 |
| 1338655 | N/A | N/A | 48763 | 48782 | CCATCGCCCCACACTCCACT | 76 | 2447 |
| 1338670 | N/A | N/A | 77545 | 77564 | GTGGCTCTCCCTTGCAGAAT | 37 | 2448 |
| 1338678 | 3838 | 3857 | 94217 | 94236 | CGTGTCCTCACACGCTCCTC | 40 | 2449 |
| 1338685 | N/A | N/A | 62940 | 62959 | CGGGAAAGCCACACACAACT | 70 | 2450 |
| 1338689 | N/A | N/A | 50512 | 50531 | GCTGTGAGCCTCACCTCCCC | 65 | 2451 |
| 1338704 | N/A | N/A | 55657 | 55676 | GGTACATCCCACATCTGCGG | 26 | 2452 |
| 1338718 | N/A | N/A | 72558 | 72577 | CCTGATGCCCTCCCCCGAGC | 74 | 2453 |
| 1338734 | N/A | N/A | 21424 | 21443 | TCCCCCGACATACACAGCAT | 44 | 2454 |
| 1338743 | N/A | N/A | 18668 | 18687 | GCACACAACCCATGTGCCCA | 55 | 2455 |
| 1338780 | N/A | N/A | 43240 | 43259 | CATCTCCCGATATAGCCCTA | 74 | 2456 |
| 1338788 | N/A | N/A | 29733 | 29752 | CTGTCCGGAGAATCCAGGCC | 41 | 2457 |
| 1338836 | N/A | N/A | 23014 | 23033 | CCTAAACCACCACTGCCCCT | 103 | 2458 |
| 1338838 | N/A | N/A | 82825 | 82844 | CGGAGAGTCCTCCCAGCCCT | 47 | 2459 |
| 1338893 | N/A | N/A | 66014 | 66033 | CTGCCTTGCCACACAAAACA | 53 | 2460 |
| 1338898 | N/A | N/A | 76608 | 76627 | TCGACACACAACATACACAA | 135 | 2461 |
| 1338927 | N/A | N/A | 79252 | 79271 | CCCAGACCCCTCACCAAACA | 92 | 2462 |
| 1338968 | N/A | N/A | 39252 | 39271 | ACCAGACACCAGCCCAAGCA | 77 | 2463 |
| 1339022 | N/A | N/A | 18188 | 18207 | GCTGCCGTTTTCAAGAATTA | 45 | 2464 |
| 1339091 | 4266 | 4285 | 94645 | 94664 | CCAGAGTGCAGAACAGCAGC | 65 | 2465 |
| 1339145 | N/A | N/A | 34966 | 34985 | GAATCCTCACCCTTAGCCCT | 67 | 2466 |
| 1339159 | N/A | N/A | 60802 | 60821 | CCAAGAGACCCCACCTGGCC | 76 | 2467 |
| 1339178 | N/A | N/A | 33778 | 33797 | AACCAGTGAGTCACTACGAA | 37 | 2468 |
| 1339207 | N/A | N/A | 44865 | 44884 | AACAAGGGCTCTCACACCTC | 103 | 2469 |
| 1339232 | N/A | N/A | 30493 | 30512 | GCCTCCTGAAATCTGGGCTT | 80 | 2470 |
| 1339281 | N/A | N/A | 84242 | 84261 | TGTCACCCCACCAGCAGCAT | 82 | 2471 |
| 1339291 | N/A | N/A | 56449 | 56468 | CAGGTGCCTTCCTTTGCCGT | 23 | 2472 |
| 1339295 | N/A | N/A | 53292 | 53311 | TCCGTGGACCTTCTGGGTCC | 31 | 2473 |
| 1339311 | N/A | N/A | 31120 | 31139 | TCAGCGAACTTAATTATATC | 54 | 2474 |
| 1339361 | N/A | N/A | 75709 | 75728 | GTTGACCCCACCCCAGAGGC | 56 | 2475 |
| 1339376 | N/A | N/A | 19222 | 19241 | CTCTCATCCTATAGACACCA | 23 | 2476 |
| | | | 19268 | 19287 | | | |
| 1339504 | 4524 | 4543 | 94903 | 94922 | AGGTAAGTGTAAAATGGTCC | 24 | 2477 |
| 1339506 | 711 | 730 | 59192 | 59211 | GTGTTGATCATCTCCAGGAC | 33 | 2478 |
| 1339543 | N/A | N/A | 40856 | 40875 | CTAATCAGCTCCCAATCCCT | 72 | 2479 |
| 1339613 | N/A | N/A | 87046 | 87065 | GGAGCTGCCAGCAATAGCAA | 31 | 2480 |
| 1339656 | N/A | N/A | 68289 | 68308 | CAGATGGTCCACCCTGGACA | 48 | 2481 |

TABLE 33
Reduction of KCNT1 RNA by 4,000 nM 5-10-5 MOE gapmers with a mixed backbone measured
with human KCNT1 primer probe set RTS39496

| | SEQ | SEQ | SEQ | SEQ | | | |
|---|---|---|---|---|---|---|---|
| | ID | ID | ID | ID | | | |
| | NO: 1 | NO: 1 | NO: 2 | NO: 2 | | KCNT1 | SEQ |
| Compound | Start | Stop | Start | Stop | | (% | ID |
| Number | Site | Site | Site | Site | Sequence (5′ to 3′) | UTC) | No. |
| 855082 | N/A | N/A | 90144 | 90163 | CCTTGCAAATATCCCAGGTT | 19 | 2482 |
| 1080855 | 3854 | 3873 | 94233 | 94252 | GTCACGCTAGTGCCACCGTG | 30 | 283 |
| 1337283 | N/A | N/A | 50286 | 50305 | GTAGAGTCCCAGCACCTGCC | 62 | 2483 |
| 1337340 | N/A | N/A | 58657 | 58676 | AGTCTTGAAACCATGGTCCT | 31 | 2484 |
| 1337345 | N/A | N/A | 93464 | 93483 | CACCAGCGCACACCTGCCAC | 56 | 2485 |
| 1337390 | N/A | N/A | 32087 | 32106 | TGCACAGCTCCCATGGATGA | 35 | 2486 |
| 1337423 | N/A | N/A | 62367 | 62386 | GGCCCAAGCACTTCACACCC | 28 | 2487 |
| 1337426 | N/A | N/A | 57691 | 57710 | GGGCCTGGTTTCCCTATTTA | 24 | 2488 |
| 1337431 | N/A | N/A | 83348 | 83367 | GTCCACGGCACCCTCTCCTC | 54 | 2489 |
| 1337464 | N/A | N/A | 25093 | 25112 | GGCCTCAGCCTTCACTCACA | 38 | 2490 |
| 1337529 | N/A | N/A | 17851 | 17870 | CCACTCCTGACTCTTGGTTC | 30 | 2491 |
| 1337544 | N/A | N/A | 39661 | 39680 | CCCTGATGAAACTTCAGCCC | 57 | 2492 |
| 1337596 | N/A | N/A | 91525 | 91544 | GTGCCTCCCCCCACGGCAGC | 17 | 2493 |
| 1337612 | N/A | N/A | 74945 | 74964 | CAAGGCAGCACTCACTCTAC | 56 | 2494 |
| 1337630 | N/A | N/A | 29978 | 29997 | CCATTTTAACCCTCTTTGCC | 46 | 2495 |
| 1337659 | N/A | N/A | 35707 | 35726 | ATCTGAAGCCCCAAACTAGC | 99 | 2496 |
| 1337764 | N/A | N/A | 76997 | 77016 | AGGTGCCGAACCTTAAGGAC | 39 | 2497 |
| 1337766 | N/A | N/A | 69099 | 69118 | ACACTATGCCACTAAGGACA | 47 | 2498 |
| 1337800 | N/A | N/A | 42693 | 42712 | GGCTCGCTGTCAACACACGA | 46 | 2499 |
| 1337807 | N/A | N/A | 28486 | 28505 | CCAAGGGACCCACTGAGGCT | 52 | 2500 |
| 1337809 | N/A | N/A | 32441 | 32460 | TCTTGGCTCACCCAGATCAT | 48 | 2501 |
| 1337820 | N/A | N/A | 45449 | 45468 | CCCTGGATGCTCAACAGCCG | 42 | 2502 |
| 1337829 | N/A | N/A | 82463 | 82482 | CGGAACACACTTTCACTCTC | 25 | 2503 |
| 1337848* | N/A | N/A | 52249 | 52268 | TCACAGCCCCAGCCTTCGCC | 28 | 2504 |
| 1337922 | N/A | N/A | 84923 | 84942 | CCCTTACTCATCAGTGGCCG | 64 | 2505 |
| 1337933 | N/A | N/A | 85800 | 85819 | TCCCAGACACACTCAGGGCC | 44 | 2506 |
| 1337936 | N/A | N/A | 22750 | 22769 | CACGCAGAAACTCTGGGCTC | 30 | 2507 |
| 1338065 | N/A | N/A | 18312 | 18331 | CAGGAATACAGCATTACAAT | 41 | 2508 |
| 1338067 | N/A | N/A | 33379 | 33398 | CAGGTAAGCATTTAAACCTT | 43 | 2509 |
| 1338133 | N/A | N/A | 53949 | 53968 | ACTGGAGACACCATCTTCGG | 25 | 2510 |
| 1338149 | N/A | N/A | 73377 | 73396 | GAGAGACTCCACCTGTCCAA | 40 | 2511 |
| 1338249 | N/A | N/A | 19540 | 19559 | AAGTTGCCCACTCCTGTACT | 49 | 2512 |
| 1338261 | N/A | N/A | 17278 | 17297 | GAATTATTCCCATGGGCTCA | 28 | 2513 |
| 1338285 | N/A | N/A | 31390 | 31409 | CTGCGGAATCCCCTCCTGCA | 27 | 2514 |
| 1338293 | N/A | N/A | 48489 | 48508 | CACTGGCTTCCGGACAGCCA | 66 | 2515 |
| 1338381 | N/A | N/A | 40418 | 40437 | TCCAGAAGAACAAACCTACC | 62 | 2516 |
| 1338390 | N/A | N/A | 37960 | 37979 | TGGGCCCGCACATCTCACAT | 65 | 2517 |
| 1338421 | N/A | N/A | 68591 | 68610 | GGATGATCCACCCCAGACGG | 45 | 2518 |
| 1338486 | N/A | N/A | 93131 | 93150 | GTGCTCAGCCCTTTGCTTCA | 28 | 2519 |
| 1338493 | N/A | N/A | 47513 | 47532 | CTGCTCAAACCATCAGGACC | 36 | 2520 |
| 1338552 | N/A | N/A | 78953 | 78972 | TCTTGGTTTCCAATCATCAT | 26 | 2521 |
| 1338568 | N/A | N/A | 64020 | 64039 | CTGCACATCCCGATTTGGCC | 30 | 2522 |
| 1338580 | N/A | N/A | 20942 | 20961 | CTGTCCACTTCCTCCACCGG | 47 | 2523 |
| 1338586 | N/A | N/A | 41277 | 41296 | ACCACGCTAGACCTCAGGCT | 16 | 2524 |
| 1338591 | N/A | N/A | 70371 | 70390 | ACAGTGCCCCCTCAGTGGGC | 62 | 2525 |
| 1338613 | N/A | N/A | 30923 | 30942 | GGACACAGTTCAATCCCGAA | 33 | 2526 |
| 1338646 | N/A | N/A | 71737 | 71756 | GTGGACCTTCCATCGCTCCT | 13 | 2527 |
| 1338647 | N/A | N/A | 48965 | 48984 | CAGAATTCTCCATTCCTGAT | 61 | 2528 |
| 1338653 | N/A | N/A | 18846 | 18865 | TCTCCCTCCAATAGAACCTC | 49 | 2529 |
| 1338666 | N/A | N/A | 34506 | 34525 | TTATGACTCAATGAGCCCAA | 44 | 2530 |
| 1338691 | N/A | N/A | 56048 | 56067 | GGAGACTCATCCCACCCCAC | 15 | 2531 |
| | | | 56112 | 56131 | | | |
| 1338695 | N/A | N/A | 21900 | 21919 | AGGAGCTAATGAAACAGCCT | 29 | 2532 |
| 1338696 | N/A | N/A | 77997 | 78016 | CACCACCAAGAAACATCGCA | 51 | 2533 |
| 1338697 | N/A | N/A | 68150 | 68169 | CTAGACAATCCACCCTGGAT | 57 | 2534 |
| 1338717 | N/A | N/A | 26887 | 26906 | TCAGGGTCATCCTCGAAGCC | 38 | 2535 |
| 1338728 | N/A | N/A | 51101 | 51120 | GAGGAAAACTCCAATGCTGC | 46 | 2536 |
| 1338853 | N/A | N/A | 55300 | 55319 | AAGGAGACCTCACTGCTCAC | 25 | 2537 |
| 1338856 | 4696 | 4715 | 95075 | 95094 | GTACAAACCAGTAAGGAACC | 30 | 2538 |
| 1338874 | N/A | N/A | 75902 | 75921 | CCGCCATGCCTCCCTGACAT | 70 | 2539 |
| 1338922 | N/A | N/A | 24240 | 24259 | GGATTCGCCCTCTCAGGGTC | 20 | 2540 |
| 1338931 | N/A | N/A | 27520 | 27539 | TGGCAGGTCCACCCTCCCCC | 23 | 2541 |
| 1338940 | N/A | N/A | 23103 | 23122 | GCCACCCTTCCCAAACTCAG | 73 | 2542 |
| 1338945 | N/A | N/A | 61550 | 61569 | GTGCATCACCAGGCGAGCCC | 17 | 2543 |
| 1338953 | N/A | N/A | 20130 | 20149 | TGGGATGGCTTCTAATGGCA | 11 | 2544 |
| 1338954 | 4364 | 4383 | 94743 | 94762 | ACCCCTCTCACATGCCCGGC | 41 | 2545 |
| 1339097 | N/A | N/A | 67530 | 67549 | TGTTTGTGCCCACCACCTCT | 51 | 2546 |
| 1339104 | 3939 | 3958 | 94318 | 94337 | TGAGCTGGCCCTCCCCCCGC | 51 | 2547 |
| 1339142 | N/A | N/A | 46151 | 46170 | CGGGAAGCTCCACACCAGCT | 71 | 2548 |
| 1339210 | N/A | N/A | 59818 | 59837 | ACTGCTGCCATTCACATGAC | 31 | 2549 |
| 1339224 | N/A | N/A | 88951 | 88970 | GGCTGGCCCAACTCTAGCTG | 42 | 2550 |
| 1339252 | N/A | N/A | 44273 | 44292 | GTGAGCTCCACCTCATGCCG | 33 | 2551 |
| 1339319 | N/A | N/A | 37049 | 37068 | GATGGAAGCCCCCTTCAACC | 68 | 2552 |
| 1339369 | N/A | N/A | 92124 | 92143 | CAGCTCATTTCACTCCGGCA | 13 | 2553 |
| 1339370 | N/A | N/A | 65554 | 65573 | GGCATGGGACAATCTCCCCC | 8 | 2554 |
| 1339411 | N/A | N/A | 86432 | 86451 | ACACAGGTCCATACCCCACC | 82 | 2555 |
| 1339449 | N/A | N/A | 56671 | 56690 | AGGTCGGGCTATCTAACCCA | 38 | 2556 |
| 1339519 | N/A | N/A | 87545 | 87564 | CAGGCTACTCCCCCCAGGCC | 41 | 2557 |
| 1339652 | N/A | N/A | 81593 | 81612 | CCACGCCATCTCCTGAGTTC | 88 | 2558 |

TABLE 34
Reduction of KCNT1 RNA by 4,000 nM 5-10-5 MOE gapmers with a mixed backbone measured
with human KCNT1 primer probe set RTS39496

| | SEQ | SEQ | SEQ | SEQ | | | |
|---|---|---|---|---|---|---|---|
| | ID | ID | ID | ID | | | |
| | NO: 1 | NO: 1 | NO: 2 | NO: 2 | | | SEQ |
| Compound | Start | Stop | Start | Stop | KCNT1 | (% | ID |
| Number | Site | Site | Site | Site | Sequence (5′ to 3) | UTC) | No. |
| 1080855 | 3854 | 3873 | 94233 | 94252 | GTCACGCTAGTGCCACCGTG | 74 | 283 |
| 1081145 | N/A | N/A | 91719 | 91738 | TCCGACCTTTACTCCAGGCC | 29 | 487 |
| 1337232 | N/A | N/A | 19885 | 19904 | GCCAGACTCACCCAACCCTA | 66 | 2559 |
| 1337354 | N/A | N/A | 74252 | 74271 | GGGTTGTGGACCTCTAGGTA | 48 | 2560 |
| 1337377 | N/A | N/A | 29759 | 29778 | CCTTTGCTCCCCTGTGGGCC | 54 | 2561 |
| 1337391 | N/A | N/A | 30627 | 30646 | GCGGCCCTCACTCTCCGGCC | 72 | 2562 |
| 1337406 | N/A | N/A | 55750 | 55769 | CCCCTCCCCACCTACTGCGG | 39 | 2563 |
| 1337429 | N/A | N/A | 58432 | 58451 | GTGAAAGACCCTCTCTGGTC | 54 | 2564 |
| 1337444 | N/A | N/A | 68924 | 68943 | CCCGTTCTCCCACCTTGACT | 115 | 2565 |
| 1337467 | N/A | N/A | 43243 | 43262 | CTGCATCTCCCGATATAGCC | 39 | 2566 |
| 1337499 | N/A | N/A | 18675 | 18694 | ACCATCGGCACACAACCCAT | 69 | 2567 |
| 1337504 | N/A | N/A | 87148 | 87167 | CCGTATTCTTCCTGAAGACT | 18 | 2568 |
| 1337561 | 4306 | 4325 | 94685 | 94704 | GCTTGGGACAGCAAACAGCC | 39 | 2569 |
| 1337629 | N/A | N/A | 82864 | 82883 | ATCCCTGTCCACACAGGGTC | 110 | 2570 |
| 1337663 | N/A | N/A | 51903 | 51922 | TCACACCCAGCAGACAGCCG | 100 | 2571 |
| 1337710 | N/A | N/A | 56475 | 56494 | AGTCACCTCCCACTGCCTGC | 47 | 2572 |
| 1337731 | N/A | N/A | 69899 | 69918 | CTGACAGCTTCTCCTGGCCA | 51 | 2573 |
| 1337739 | N/A | N/A | 27829 | 27848 | TATATTCAATCAACTTAGGA | 57 | 2574 |
| 1337780 | N/A | N/A | 90945 | 90964 | CCCGAGCTAACACCCGTCCT | 35 | 2575 |
| 1337897 | N/A | N/A | 87845 | 87864 | GACCCCAGCACATCCTGGCC | 27 | 2576 |
| 1337923 | N/A | N/A | 53304 | 53323 | TGCTCCAGCCTTTCCGTGGA | 39 | 2577 |
| 1337928 | N/A | N/A | 93325 | 93344 | CACAGATCTTCATAGCAACC | 52 | 2578 |
| 1337996 | N/A | N/A | 85469 | 85488 | ACCTGTCTCCTCTCTCCCGT | 44 | 2579 |
| 1338014 | N/A | N/A | 48101 | 48120 | GAGCACCACCACAAAAAGGA | 61 | 2580 |
| 1338024 | N/A | N/A | 20550 | 20569 | GCGGCACTTCCACCTTACCC | 57 | 2581 |
| 1338120 | N/A | N/A | 18220 | 18239 | CTTCCTGCCCAATATCGGAA | 80 | 2582 |
| 1338164 | N/A | N/A | 84246 | 84265 | TGCATGTCACCCCACCAGCA | 69 | 2583 |
| 1338177 | N/A | N/A | 60854 | 60873 | CCCCCACCTTTACCCTGGCT | 53 | 2584 |
| 1338246 | N/A | N/A | 27291 | 27310 | GTGTTTCTACATAAGCCACA | 25 | 2585 |
| 1338248 | N/A | N/A | 47129 | 47148 | GTTTATCTGGCAAACAGCAA | 56 | 2586 |
| 1338257 | N/A | N/A | 37501 | 37520 | TTTCTGACCTCACTAGGCCT | 76 | 2587 |
| 1338280 | N/A | N/A | 65245 | 65264 | AGGCTCAGTCTTTCCAGTCA | 63 | 2588 |
| 1338342 | N/A | N/A | 79263 | 79282 | ACTGGAGCCCTCCCAGACCC | 92 | 2589 |
| 1338364 | N/A | N/A | 23016 | 23035 | CCCCTAAACCACCACTGCCC | 91 | 2590 |
| 1338409 | N/A | N/A | 31723 | 31742 | GACCCAACTTCCACTTTGCA | 88 | 2591 |
| 1338414 | N/A | N/A | 19227 | 19246 | CTTCCCTCTCATCCTATAGA | 91 | 2592 |
| | | | 19273 | 19292 | | | |
| 1338455 | N/A | N/A | 77627 | 77646 | GTGCCTCTAACATAGACACT | 50 | 2593 |
| 1338465 | N/A | N/A | 23713 | 23732 | GCATTTCACTCACTCAGGAC | 34 | 2594 |
| 1338503 | 758 | 777 | 59306 | 59325 | ACAGGTTCCGCAGCGGCGGC | 35 | 2595 |
| 1338522 | N/A | N/A | 45024 | 45043 | GAGCCCATTTCCCAAGTTCA | 50 | 2596 |
| 1338542 | N/A | N/A | 54395 | 54414 | CTCAAACTCTCCTAGTGGGT | 35 | 2597 |
| 1338616 | N/A | N/A | 75801 | 75820 | CAGCAGGCCACCACCCCGTC | 80 | 2598 |
| 1338664 | N/A | N/A | 21434 | 21453 | AAAGCATGCATCCCCCGACA | 51 | 2599 |
| 1338667 | N/A | N/A | 48765 | 48784 | GACCATCGCCCCACACTCCA | 59 | 2600 |
| 1338703 | N/A | N/A | 22304 | 22323 | GAGACATCCCCACCGCAACC | 105 | 2601 |
| 1338713 | N/A | N/A | 92580 | 92599 | TTGGAGTTCCCACAGTGTGA | 43 | 2602 |
| 1338749 | N/A | N/A | 40863 | 40882 | ACGCTGTCTAATCAGCTCCC | 44 | 2603 |
| 1338765 | 3841 | 3860 | 94220 | 94239 | CACCGTGTCCTCACACGCTC | 44 | 2604 |
| 1338772 | N/A | N/A | 40303 | 40322 | CAGCTCCATTACCTCTGCTC | 67 | 2605 |
| 1338777 | N/A | N/A | 68397 | 68416 | ATGGTCCACCTTGAATGGTC | 36 | 2606 |
| 1338804 | N/A | N/A | 32378 | 32397 | CTGCTAATCCCCCTCACCAC | 61 | 2607 |
| 1338885 | N/A | N/A | 39300 | 39319 | CCCAACCATCCCCAGAGGAC | 99 | 2608 |
| 1338901 | N/A | N/A | 31122 | 31141 | GCTCAGCGAACTTAATTATA | 61 | 2609 |
| 1338916 | N/A | N/A | 89652 | 89671 | TCACAGGCCACCTGTTCCCC | 81 | 2610 |
| 1338951 | N/A | N/A | 49228 | 49247 | GGGAGCCTCACCATGCCCTT | 82 | 2611 |
| 1338963 | N/A | N/A | 71266 | 71285 | CACCATCACCCAACAGCATG | 70 | 2612 |
| 1338965 | N/A | N/A | 17748 | 17767 | CTTCATGGTCCTCATGGATA | 22 | 2613 |
| 1339061 | N/A | N/A | 36681 | 36700 | CGGCTGCTCCATGATGCAGT | 78 | 2614 |
| 1339084 | N/A | N/A | 8837 | 8856 | CAGAAAATGACCAACTCACT | 52 | 2615 |
| | | | 37281 | 37300 | | | |
| 1339094 | N/A | N/A | 63151 | 63170 | GATTGGTGAATCAAAGCCAA | 47 | 2616 |
| 1339103 | N/A | N/A | 72697 | 72716 | TGGCTGAGCCCTCCCGTCCC | 120 | 2617 |
| 1339105 | N/A | N/A | 45677 | 45696 | TGCAGACGCATCCATTTCCT | 63 | 2618 |
| 1339171 | N/A | N/A | 33842 | 33861 | GATATGGCTCCTACTCCACC | 70 | 2619 |
| 1339186 | N/A | N/A | 26466 | 26485 | GCCACGCCCCTCGCCGACCA | 31 | 2620 |
| 1339214 | N/A | N/A | 76739 | 76758 | GAAATGGACACACCCGGACA | 120 | 2621 |
| 1339234 | N/A | N/A | 66023 | 66042 | GAGGCTCCACTGCCTTGCCA | 49 | 2622 |
| 1339264 | 4538 | 4557 | 94917 | 94936 | GGCTTTGCTTTAAAAGGTAA | 87 | 2623 |
| 1339269 | N/A | N/A | 50557 | 50576 | TGTCACTGTCCACCAGGGCA | 45 | 2624 |
| 1339274 | N/A | N/A | 67952 | 67971 | AATGGTCCACCCCAGACGAT | 54 | 2625 |
| 1339429 | N/A | N/A | 42388 | 42407 | GCACCCCACAACCCCAAGTC | 73 | 2626 |
| 1339446 | N/A | N/A | 62095 | 62114 | AGACCCACCATCTCCCCAGA | 100 | 2627 |
| 1339464 | N/A | N/A | 33011 | 33030 | CAATTGCTAAACCACACTTT | 63 | 2628 |
| 1339474 | N/A | N/A | 78691 | 78710 | GGCCACAGATTATAACCCAC | 73 | 2629 |
| 1339490 | N/A | N/A | 57163 | 57182 | GTAGGGCACTCACCTGGATC | 93 | 2630 |
| 1339515 | N/A | N/A | 34973 | 34992 | AGTGCCGGAATCCTCACCCT | 37 | 2631 |
| 1339546 | N/A | N/A | 24575 | 24594 | GGTGCTTTTCCATAGCAGCT | 31 | 2632 |
| 1339620 | N/A | N/A | 86299 | 86318 | GCCAGGCACCCATAGGTCAA | 30 | 2633 |
| 1339666 | N/A | N/A | 82025 | 82044 | CAGAAAGCCAATTCCAGCTC | 67 | 2634 |

TABLE 35
Reduction of KCNT1 RNA by 4,000 nM 5-10-5 MOE gapmers with a mixed backbone measured
with human KCNT1 primer probe set RTS39496

| | SEQ | SEQ | SEQ | SEQ | | | |
|---|---|---|---|---|---|---|---|
| | ID | ID | ID | ID | | | |
| | NO: 1 | NO: 1 | NO: 2 | NO: 2 | | KCNT1 | SEQ |
| Compound | Start | Stop | Start | Stop | | (% | ID |
| Number | Site | Site | Site | Site | Sequence (5′ to 3′) | UTC) | No. |
| 1080855 | 3854 | 3873 | 94233 | 94252 | GTCACGCTAGTGCCACCGTG | 20 | 283 |
| 1080889 | 4699 | 4718 | 95078 | 95097 | ACCGTACAAACCAGTAAGGA | 21 | 133 |
| 1337293 | N/A | N/A | 48995 | 49014 | CTGGCATCCACCGGCTCCCC | 32 | 2635 |
| 1337302 | N/A | N/A | 83422 | 83441 | CTGGTGCCTTCTACAGGCTC | 50 | 2636 |
| 1337333 | N/A | N/A | 90157 | 90176 | CAGGGCAGAATTACCTTGCA | 28 | 2637 |
| 1337360 | N/A | N/A | 20273 | 20292 | CGTCCTCCCACCTCACACGG | 39 | 2638 |
| 1337411 | N/A | N/A | 17299 | 17318 | CTGCCAGCCCCCTCAGCGGA | 33 | 2639 |
| 1337501 | N/A | N/A | 54076 | 54095 | CTGAGCACTCTTACGCATAA | 22 | 2640 |
| 1337549 | N/A | N/A | 93600 | 93619 | GTCCCATCTCCACACAGGGC | 34 | 2641 |
| 1337567 | N/A | N/A | 71769 | 71788 | GGACCTCAACCCCCTACTTG | 44 | 2642 |
| 1337576 | N/A | N/A | 75974 | 75993 | GGTCTTTCTCCTCCCACCAC | 46 | 2643 |
| 1337606 | N/A | N/A | 38100 | 38119 | CACCCCCCAATTCCTACCTC | 81 | 2644 |
| 1337608 | N/A | N/A | 58710 | 58729 | GTCTTAGCCACCAAGGCCTT | 47 | 2645 |
| 1337614 | N/A | N/A | 79138 | 79157 | CAGCTGTACCCACAGGCGGC | 64 | 2646 |
| 1337616 | N/A | N/A | 62591 | 62610 | CAGAGGCTCCCTAGGAGCAC | 81 | 2647 |
| 1337711 | N/A | N/A | 67861 | 67880 | CTATAATGCTCTCATGGCTC | 49 | 2648 |
| 1337763 | N/A | N/A | 40427 | 40446 | GATCCACACTCCAGAAGAAC | 39 | 2649 |
| 1337805 | N/A | N/A | 87555 | 87574 | TCCAAACTCACAGGCTACTC | 18 | 2650 |
| 1337817 | N/A | N/A | 93151 | 93170 | ACAGGCCATTCCCACTCGCT | 26 | 2651 |
| 1337840 | N/A | N/A | 31008 | 31027 | CTTAATTACCTCTAAAGAAC | 64 | 2652 |
| 1337862 | N/A | N/A | 56769 | 56788 | ACGACAGGCAACAGCAGCCT | 23 | 2653 |
| 1337884 | N/A | N/A | 51263 | 51282 | ACCGTGGCCACCTGCATGAC | 61 | 2654 |
| 1337915 | N/A | N/A | 46179 | 46198 | GCAGGTAGTCATACACAGAT | 48 | 2655 |
| 1337947 | N/A | N/A | 17963 | 17982 | TGGGCTCATTATTAGAGCAC | 40 | 2656 |
| 1337964 | N/A | N/A | 73399 | 73418 | GACAGATTCAAAAACAGGCC | 18 | 2657 |
| 1337966 | 1414 | 1433 | 70612 | 70631 | GCAGGCCTCCCCATTGTCCA | 28 | 2658 |
| 1337969 | N/A | N/A | 85810 | 85829 | AGCTCTATCTTCCCAGACAC | 50 | 2659 |
| 1337993 | N/A | N/A | 35834 | 35853 | CTGGACATTCTCAAAGTGCC | 53 | 2660 |
| 1338000 | N/A | N/A | 61853 | 61872 | CCAGAGGACCCACCTGCAGT | 83 | 2661 |
| 1338012 | N/A | N/A | 82499 | 82518 | TCCAGGATCCCTATGGGCTC | 38 | 2662 |
| 1338038 | N/A | N/A | 81677 | 81696 | CAGTGCCTCACACGCGGTCA | 46 | 2663 |
| 1338040 | N/A | N/A | 27581 | 27600 | GCCCAAAACTACAGCGGTCT | 26 | 2664 |
| 1338043 | N/A | N/A | 64148 | 64167 | TGGCCTTGTCTTACTTCTTA | 36 | 2665 |
| 1338061 | N/A | N/A | 86661 | 86680 | GCCCATCCACCCACTTGGAC | 77 | 2666 |
| 1338144 | N/A | N/A | 39870 | 39889 | CAGGTGCTTGACCTTAGCCT | 42 | 2667 |
| 1338159 | N/A | N/A | 21946 | 21965 | TGCTCAACTCCAGAGAACCA | 47 | 2668 |
| 1338180 | N/A | N/A | 42852 | 42871 | CAGCATCCAAACCCACGGTG | 33 | 2669 |
| 1338198 | N/A | N/A | 18867 | 18886 | GAAGCTCTAATCCCTGGCCA | 29 | 2670 |
| 1338201 | N/A | N/A | 75153 | 75172 | TCAGTGACACTCAAAAGTGC | 57 | 2671 |
| 1338218 | N/A | N/A | 32485 | 32504 | GCGACTCTGAACCTCTGCCT | 24 | 2672 |
| 1338282 | N/A | N/A | 25303 | 25322 | CAGCTGGAACTCCTGACACC | 45 | 2673 |
| 1338300 | N/A | N/A | 48515 | 48534 | TGCAACCCTGCCCATTGCCA | 37 | 2674 |
| 1338365 | N/A | N/A | 69372 | 69391 | AGGGAACCCCACCACATCAC | 37 | 2675 |
| 1338391 | 4367 | 4386 | 94746 | 94765 | CGCACCCCTCTCACATGCCC | 38 | 2676 |
| 1338429 | N/A | N/A | 31446 | 31465 | GCTGGGCCCGCATCTGGAGC | 72 | 2677 |
| 1338445 | N/A | N/A | 26983 | 27002 | CCAAGATTACCCTCAGGATC | 29 | 2678 |
| 1338447 | N/A | N/A | 77135 | 77154 | CCCTTAACCACCTGTGCATC | 73 | 2679 |
| 1338478 | N/A | N/A | 41675 | 41694 | TGACGGGACCATACTCAGGA | 50 | 2680 |
| 1338498 | N/A | N/A | 22835 | 22854 | GCGCAGCCCAGCCCTAGCTT | 27 | 2681 |
| 1338571 | N/A | N/A | 68088 | 68107 | GGTCCACCCCAGACAGTCCA | 14 | 2682 |
| | | | 68615 | 68634 | | | |
| 1338611 | N/A | N/A | 59992 | 60011 | ACGGGTCCCCATCTTGCCTA | 42 | 2683 |
| 1338671 | N/A | N/A | 91603 | 91622 | CGCCTGAATCCCCCACGCCA | 33 | 2684 |
| 1338707 | N/A | N/A | 50381 | 50400 | CCAAAGCTCACAACACTCAG | 50 | 2685 |
| 1338879 | N/A | N/A | 24380 | 24399 | TCTGTTTTACACTAATGCGG | 24 | 2686 |
| 1338884 | N/A | N/A | 68191 | 68210 | TGGATGGTCCCCCCTGGACA | 72 | 2687 |
| 1338889 | N/A | N/A | 89080 | 89099 | CCAAAGTCTCCCCCCTACCC | 59 | 2688 |
| 1338906 | N/A | N/A | 78023 | 78042 | GCTGGCCCCACATGCAGGCA | 39 | 2689 |
| 1338937 | 3974 | 3993 | 94353 | 94372 | AAAACTCTCCTCACTAGCCT | 32 | 2690 |
| 1338957 | N/A | N/A | 34522 | 34541 | CCCACACGCCATACAGTTAT | 51 | 2691 |
| 1339011* | N/A | N/A | 52596 | 52615 | CAAGTCCTCACCTGCAATCC | 45 | 2692 |
| 1339086 | N/A | N/A | 28503 | 28522 | CCAACAGGTTCTACCTACCA | 53 | 2693 |
| 1339090 | N/A | N/A | 19574 | 19593 | AAGCCCCCAACTCACTTGCC | 48 | 2694 |
| 1339126 | N/A | N/A | 45576 | 45595 | CACCCGTCACCCTCTGCACC | 41 | 2695 |
| 1339136 | N/A | N/A | 44337 | 44356 | CCCTGCTCAGCACGAAGCCA | 56 | 2696 |
| 1339196 | N/A | N/A | 20955 | 20974 | TGAGCTCCCAACTCTGTCCA | 27 | 2697 |
| 1339230 | N/A | N/A | 29995 | 30014 | GCATAACACAAATATTGCCA | 16 | 2698 |
| 1339258 | N/A | N/A | 57906 | 57925 | GTCCTTGGCATTCACTGAGC | 20 | 2699 |
| 1339301 | N/A | N/A | 56215 | 56234 | AGGCTGGGCATTATCCCTCA | 18 | 2700 |
| 1339321 | N/A | N/A | 23380 | 23399 | GACTGGGATCCCACCTGGCC | 75 | 2701 |
| 1339363 | N/A | N/A | 47598 | 47617 | TCCCAGGCTTCTCTTGGGAC | 80 | 2702 |
| 1339398 | N/A | N/A | 84932 | 84951 | CCGGGTTCGCCCTTACTCAT | 56 | 2703 |
| 1339415 | N/A | N/A | 32173 | 32192 | CTGCAATTCAACACTGCCTT | 30 | 2704 |
| 1339421 | N/A | N/A | 55333 | 55352 | CCCAGACCATCATCGATGCC | 18 | 2705 |
| 1339422 | N/A | N/A | 18334 | 18353 | CTGCTGTCCACTCCTGAACA | 70 | 2706 |
| 1339466 | N/A | N/A | 33510 | 33529 | AAGCTGCTAAAAGAAATGCC | 38 | 2707 |
| 1339484 | N/A | N/A | 37163 | 37182 | GCATGTCGCCCTGGCTGCCT | 15 | 2708 |
| 1339629 | N/A | N/A | 65742 | 65761 | GATCTGATTGGAAATAGGTC | 10 | 2709 |
| 1339645 | N/A | N/A | 92127 | 92146 | CACCAGCTCATTTCACTCCG | 24 | 2710 |

TABLE 36
Reduction of KCNT1 RNA by 4,000 nM 5-10-5 MOE gapmers with a mixed backbone measured
with human KCNT1 primer probe set RTS39496

| | SEQ | SEQ | SEQ | SEQ | | | |
|---|---|---|---|---|---|---|---|
| | ID | ID | ID | ID | | | |
| | NO: 1 | NO: 1 | NO: 2 | NO: 2 | | KCNT1 | SEQ |
| Compound | Start | Stop | Start | Stop | | (% | ID |
| Number | Site | Site | Site | Site | Sequence (5′ to 3′) | UTC) | No. |
| 1080855 | 3854 | 3873 | 94233 | 94252 | GTCACGCTAGTGCCACCGTG | 31 | 283 |
| 1337223 | N/A | N/A | 56050 | 56069 | GTGGAGACTCATCCCACCCC | 13 | 2711 |
| | | | 56114 | 56133 | | | |
| 1337322 | N/A | N/A | 17280 | 17299 | ATGAATTATTCCCATGGGCT | 26 | 2712 |
| 1337364 | N/A | N/A | 39845 | 39864 | GCCTCTTCTGCAAATGGGAC | 35 | 2713 |
| 1337371 | N/A | N/A | 41284 | 41303 | GAACTGGACCACGCTAGACC | 51 | 2714 |
| 1337376 | N/A | N/A | 23302 | 23321 | ATATAACCACCCCCTACCCC | 97 | 2715 |
| 1337422 | N/A | N/A | 93147 | 93166 | GCCATTCCCACTCGCTGTGC | 41 | 2716 |
| 1337441 | N/A | N/A | 50377 | 50396 | AGCTCACAACACTCAGGGTA | 50 | 2717 |
| 1337446 | N/A | N/A | 77078 | 77097 | TCATAGGGCCTGCCTAGCCT | 37 | 2718 |
| 1337449 | N/A | N/A | 29979 | 29998 | GCCATTTTAACCCTCTTTGC | 13 | 2719 |
| 1337451 | N/A | N/A | 75041 | 75060 | GAAGCTGCAATTCAGAGCAT | 52 | 2720 |
| 1337461 | N/A | N/A | 48501 | 48520 | TTGCCAGGACCTCACTGGCT | 69 | 2721 |
| 1337509 | N/A | N/A | 92125 | 92144 | CCAGCTCATTTCACTCCGGC | 19 | 2722 |
| 1337519 | N/A | N/A | 17895 | 17914 | CGCTCACTCCCTGATTCTGA | 26 | 2723 |
| 1337535 | N/A | N/A | 68593 | 68612 | CTGGATGATCCACCCCAGAC | 59 | 2724 |
| 1337631 | 4365 | 4384 | 94744 | 94763 | CACCCCTCTCACATGCCCGG | 30 | 2725 |
| 1337679 | N/A | N/A | 91527 | 91546 | TAGTGCCTCCCCCCACGGCA | 56 | 2726 |
| 1337786 | 3941 | 3960 | 94320 | 94339 | GGTGAGCTGGCCCTCCCCCC | 22 | 2727 |
| 1337873 | N/A | N/A | 64025 | 64044 | GCCTGCTGCACATCCCGATT | 46 | 2728 |
| 1337893 | N/A | N/A | 45489 | 45508 | TTTGGGATAATAATAGGTCC | 59 | 2729 |
| 1337898 | N/A | N/A | 61584 | 61603 | CCCACGGGACCCTCACTGCC | 58 | 2730 |
| 1337927 | N/A | N/A | 42768 | 42787 | CTGCCAGCCCTAACTTAGCT | 37 | 2731 |
| 1337945 | N/A | N/A | 70397 | 70416 | CCCCTACTCTCTGCTGGTCA | 42 | 2732 |
| 1337953* | N/A | N/A | 52279 | 52298 | TGGCTCCCACCCCATGGACT | 59 | 2733 |
| 1337974 | N/A | N/A | 88953 | 88972 | CTGGCTGGCCCAACTCTAGC | 45 | 2734 |
| 1338017 | N/A | N/A | 22781 | 22800 | CCCTAGGTCCTGCCCAGGCC | 37 | 2735 |
| 1338057 | N/A | N/A | 58658 | 58677 | GAGTCTTGAAACCATGGTCC | 36 | 2736 |
| 1338090 | N/A | N/A | 85806 | 85825 | CTATCTTCCCAGACACACTC | 63 | 2737 |
| 1338095 | N/A | N/A | 82466 | 82485 | GGCCGGAACACACTTTCACT | 44 | 2738 |
| 1338207 | N/A | N/A | 81634 | 81653 | CTGGTTCCACCATCAAGAGC | 34 | 2739 |
| 1338240 | N/A | N/A | 78003 | 78022 | GAGTCCCACCACCAAGAAAC | 75 | 2740 |
| 1338278 | N/A | N/A | 56694 | 56713 | CATGAATGTCCCTAAGAGCA | 56 | 2741 |
| 1338349 | N/A | N/A | 34508 | 34527 | AGTTATGACTCAATGAGCCC | 84 | 2742 |
| 1338377 | N/A | N/A | 18850 | 18869 | CCACTCTCCCTCCAATAGAA | 36 | 2743 |
| 1338431 | N/A | N/A | 75920 | 75939 | CCACAGGGCTCTGCCCGCCC | 27 | 2744 |
| 1338473 | N/A | N/A | 59959 | 59978 | GAGGCTTAAGTCTCAGGTCA | 14 | 2745 |
| 1338550 | N/A | N/A | 27521 | 27540 | TTGGCAGGTCCACCCTCCCC | 55 | 2746 |
| 1338601 | N/A | N/A | 24347 | 24366 | TTGTGTCACACACATGAGTC | 32 | 2747 |
| 1338606 | N/A | N/A | 78954 | 78973 | GTCTTGGTTTCCAATCATCA | 29 | 2748 |
| 1338618 | N/A | N/A | 26888 | 26907 | TTCAGGGTCATCCTCGAAGC | 45 | 2749 |
| 1338642 | N/A | N/A | 71740 | 71759 | TCGGTGGACCTTCCATCGCT | 33 | 2750 |
| 1338659 | N/A | N/A | 38011 | 38030 | CACAGATCCCACCTGTGTGT | 58 | 2751 |
| 1338662 | N/A | N/A | 83387 | 83406 | GGCGGATCCCAGCCTCTGCA | 44 | 2752 |
| 1338673 | N/A | N/A | 47519 | 47538 | ACCCGTCTGCTCAAACCATC | 50 | 2753 |
| 1338682 | N/A | N/A | 57749 | 57768 | TGCTCACTGACCCTGAGTCA | 22 | 2754 |
| 1338688 | N/A | N/A | 62436 | 62455 | CATCTCCCCAATAGCAGGGT | 23 | 2755 |
| 1338729 | N/A | N/A | 51123 | 51142 | CCAGGGTTTAATGATCCCCT | 77 | 2756 |
| 1338733 | N/A | N/A | 21901 | 21920 | GAGGAGCTAATGAAACAGCC | 72 | 2757 |
| 1338741 | N/A | N/A | 18326 | 18345 | CACTCCTGAACACTCAGGAA | 58 | 2758 |
| 1338763 | N/A | N/A | 32443 | 32462 | GATCTTGGCTCACCCAGATC | 64 | 2759 |
| 1338935 | N/A | N/A | 90145 | 90164 | ACCTTGCAAATATCCCAGGT | 24 | 2760 |
| 1338946 | N/A | N/A | 55301 | 55320 | CAAGGAGACCTCACTGCTCA | 18 | 2761 |
| 1338986 | N/A | N/A | 28498 | 28517 | AGGTTCTACCTACCAAGGGA | 39 | 2762 |
| 1339001 | 4697 | 4716 | 95076 | 95095 | CGTACAAACCAGTAAGGAAC | 19 | 2763 |
| 1339017 | N/A | N/A | 20943 | 20962 | TCTGTCCACTTCCTCCACCG | 43 | 2764 |
| 1339035 | N/A | N/A | 31403 | 31422 | TCATTCCCGCCATCTGCGGA | 54 | 2765 |
| 1339047 | N/A | N/A | 86433 | 86452 | GACACAGGTCCATACCCCAC | 66 | 2766 |
| 1339054 | N/A | N/A | 73378 | 73397 | AGAGAGACTCCACCTGTCCA | 59 | 2767 |
| 1339056 | N/A | N/A | 46152 | 46171 | CCGGGAAGCTCCACACCAGC | 88 | 2768 |
| 1339106 | N/A | N/A | 67589 | 67608 | AGGGTCAGACCCTCTGAGCC | 136 | 2769 |
| 1339119 | N/A | N/A | 65618 | 65637 | GAGGTTTCTACAGCCACCGT | 38 | 2770 |
| 1339253 | N/A | N/A | 54032 | 54051 | CTACGGGTATGAAAAAGTCA | 43 | 2771 |
| 1339294 | N/A | N/A | 30945 | 30964 | GCTTTGATATATAAATCTTG | 31 | 2772 |
| 1339306 | N/A | N/A | 25240 | 25259 | GTCACGGGACAGCTCACCCA | 40 | 2773 |
| 1339324 | N/A | N/A | 32165 | 32184 | CAACACTGCCTTACTGTGAA | 46 | 2774 |
| 1339383 | N/A | N/A | 48966 | 48985 | GCAGAATTCTCCATTCCTGA | 30 | 2775 |
| 1339390 | N/A | N/A | 20207 | 20226 | AGGCAGACGACCCCTGGTCT | 44 | 2776 |
| 1339394 | N/A | N/A | 19541 | 19560 | AAAGTTGCCCACTCCTGTAC | 126 | 2777 |
| 1339407 | N/A | N/A | 35743 | 35762 | TCTGAGACCCATCTGGGTCT | 102 | 2778 |
| 1339458 | N/A | N/A | 68151 | 68170 | CCTAGACAATCCACCCTGGA | 78 | 2779 |
| 1339505 | N/A | N/A | 33412 | 33431 | CGTTAGAGAATTACACAAAA | 35 | 2780 |
| 1339524 | N/A | N/A | 93465 | 93484 | ACACCAGCGCACACCTGCCA | 38 | 2781 |
| 1339545 | N/A | N/A | 87546 | 87565 | ACAGGCTACTCCCCCCAGGC | 49 | 2782 |
| 1339563 | N/A | N/A | 84924 | 84943 | GCCCTTACTCATCAGTGGCC | 57 | 2783 |
| 1339568 | N/A | N/A | 44274 | 44293 | GGTGAGCTCCACCTCATGCC | 47 | 2784 |
| 1339587 | N/A | N/A | 37093 | 37112 | CACGAGTACCCTCTGCCAGC | 38 | 2785 |
| 1339592 | N/A | N/A | 40421 | 40440 | CACTCCAGAAGAACAAACCT | 83 | 2786 |
| 1339599 | N/A | N/A | 69368 | 69387 | AACCCCACCACATCACTGGC | 64 | 2787 |

TABLE 37
Reduction of KCNT1 RNA by 4,000 nM 5-10-5 MOE gapmers with a mixed backbone measured
with human KCNT1 primer probe set RTS39496

| | SEQ | SEQ | SEQ | SEQ | | | |
|---|---|---|---|---|---|---|---|
| | ID | ID | ID | ID | | | |
| | NO: 1 | NO: 1 | NO: 2 | NO: 2 | | KCNT1 | SEQ |
| Compound | Start | Stop | Start | Stop | | (% | ID |
| Number | Site | Site | Site | Site | Sequence (5′ to 3′) | UTC) | No. |
| 1080852 | 3842 | 3861 | 94221 | 94240 | CCACCGTGTCCTCACACGCT | 18 | 49 |
| 1080855 | 3854 | 3873 | 94233 | 94252 | GTCACGCTAGTGCCACCGTG | 19 | 283 |
| 1337273 | N/A | N/A | 72758 | 72777 | ACCAGAGTCCCCACCGGAGC | 45 | 2788 |
| 1337300 | N/A | N/A | 42401 | 42420 | GGAGTGTCCCTCTGCACCCC | 43 | 2789 |
| 1337306 | 759 | 778 | 59307 | 59326 | AACAGGTTCCGCAGCGGCGG | 18 | 2790 |
| 1337311 | N/A | N/A | 56477 | 56496 | GCAGTCACCTCCCACTGCCT | 58 | 2791 |
| 1337394 | N/A | N/A | 40304 | 40323 | GCAGCTCCATTACCTCTGCT | 35 | 2792 |
| 1337412 | N/A | N/A | 27292 | 27311 | CGTGTTTCTACATAAGCCAC | 28 | 2793 |
| 1337414 | N/A | N/A | 20553 | 20572 | CAAGCGGCACTTCCACCTTA | 62 | 2794 |
| 1337453 | N/A | N/A | 53574 | 53593 | CCACCCACCCTCATCGCGGC | 50 | 2795 |
| 1337480 | N/A | N/A | 21634 | 21653 | CATGTCCTGCTTAATGCCTG | 33 | 2796 |
| 1337486 | N/A | N/A | 23714 | 23733 | TGCATTTCACTCACTCAGGA | 27 | 2797 |
| 1337502 | N/A | N/A | 62097 | 62116 | GGAGACCCACCATCTCCCCA | 54 | 2798 |
| 1337556 | N/A | N/A | 34992 | 35011 | CTTCTGAGTCCAAACTGGGA | 66 | 2799 |
| 1337559 | N/A | N/A | 26544 | 26563 | CAGACACTCAACTTGACCTC | 48 | 2800 |
| 1337605 | N/A | N/A | 48770 | 48789 | GCCCTGACCATCGCCCCACA | 259 | 2801 |
| 1337689 | N/A | N/A | 43462 | 43481 | GGCTCAGCTTCCCTCTCGCT | 61 | 2802 |
| 1337699 | N/A | N/A | 77629 | 77648 | AGGTGCCTCTAACATAGACA | 46 | 2803 |
| 1337733 | N/A | N/A | 85486 | 85505 | TTAGCAGCTAAAACGACACC | 85 | 2804 |
| 1337744 | N/A | N/A | 93326 | 93345 | GCACAGATCTTCATAGCAAC | 25 | 2805 |
| 1337749 | N/A | N/A | 33852 | 33871 | ATTCCATCCAGATATGGCTC | 49 | 2806 |
| 1337767 | N/A | N/A | 18692 | 18711 | GCGGTCCACCTCCTAATACC | 37 | 2807 |
| 1337785 | N/A | N/A | 57198 | 57217 | TTACTGAGCACCACTGCAGT | 71 | 2808 |
| 1337839 | N/A | N/A | 36753 | 36772 | AACGAACCCACAGCCCACCG | 48 | 2809 |
| 1337914 | N/A | N/A | 40864 | 40883 | CACGCTGTCTAATCAGCTCC | 44 | 2810 |
| 1337979 | N/A | N/A | 33014 | 33033 | ATTCAATTGCTAAACCACAC | 71 | 2811 |
| 1338023 | N/A | N/A | 47136 | 47155 | CTCATTTGTTTATCTGGCAA | 29 | 2812 |
| 1338097 | N/A | N/A | 58467 | 58486 | TCTACTGACCCCTCTGGAAC | 71 | 2813 |
| 1338125 | N/A | N/A | 45025 | 45044 | GGAGCCCATTTCCCAAGTTC | 50 | 2814 |
| 1338224 | N/A | N/A | 63220 | 63239 | CCAGGTTTATGATCGAGGGA | 18 | 2815 |
| 1338263 | N/A | N/A | 89659 | 89678 | AAGGTCTTCACAGGCCACCT | 29 | 2816 |
| 1338305 | N/A | N/A | 19228 | 19247 | CCTTCCCTCTCATCCTATAG | 77 | 2817 |
| | | | 19274 | 19293 | | | |
| 1338320 | N/A | N/A | 32379 | 32398 | TCTGCTAATCCCCCTCACCA | 54 | 2818 |
| 1338362 | N/A | N/A | 17757 | 17776 | TTTACAAATCTTCATGGTCC | 37 | 2819 |
| 1338588 | 4539 | 4558 | 94918 | 94937 | AGGCTTTGCTTTAAAAGGTA | 18 | 2820 |
| 1338612 | 2540 | 2559 | 79454 | 79473 | TGCGGGATCTGTAGTAGGCC | 51 | 2821 |
| 1338623 | N/A | N/A | 74292 | 74311 | AGACTCTGCCACTCCTGCAC | 52 | 2822 |
| 1338640 | N/A | N/A | 31727 | 31746 | TGCAGACCCAACTTCCACTT | 36 | 2823 |
| 1338736 | N/A | N/A | 66027 | 66046 | TGACGAGGCTCCACTGCCTT | 51 | 2824 |
| 1338745 | N/A | N/A | 71267 | 71286 | GCACCATCACCCAACAGCAT | 47 | 2825 |
| 1338787 | N/A | N/A | 78692 | 78711 | CGGCCACAGATTATAACCCA | 46 | 2826 |
| 1338808 | N/A | N/A | 67953 | 67972 | GAATGGTCCACCCCAGACGA | 26 | 2827 |
| 1338832 | N/A | N/A | 84247 | 84266 | ATGCATGTCACCCCACCAGC | 47 | 2828 |
| 1338870 | N/A | N/A | 31129 | 31148 | TTCAACTGCTCAGCGAACTT | 45 | 2829 |
| 1338878 | N/A | N/A | 22305 | 22324 | AGAGACATCCCCACCGCAAC | 64 | 2830 |
| 1338910 | N/A | N/A | 76762 | 76781 | ACATGGCCCCATACAGGCAC | 56 | 2831 |
| 1338976 | N/A | N/A | 23017 | 23036 | GCCCCTAAACCACCACTGCC | 41 | 2832 |
| 1339009 | N/A | N/A | 90957 | 90976 | AAACAGGTCCCTCCCGAGCT | 39 | 2833 |
| 1339026 | N/A | N/A | 18222 | 18241 | CACTTCCTGCCCAATATCGG | 42 | 2834 |
| 1339034 | N/A | N/A | 45700 | 45719 | GCGGCACACACTATAGCCTC | 46 | 2835 |
| 1339075 | N/A | N/A | 69900 | 69919 | GCTGACAGCTTCTCCTGGCC | 39 | 2836 |
| 1339078 | N/A | N/A | 29823 | 29842 | AGGATGGTCATCCTTCGGCT | 24 | 2837 |
| 1339079 | N/A | N/A | 82053 | 82072 | GGTGGTGCCCTTCATGGAGC | 40 | 2838 |
| 1339089 | N/A | N/A | 49279 | 49298 | GTCTGCTCACCTCACTTGCT | 47 | 2839 |
| 1339139 | N/A | N/A | 48106 | 48125 | TCTCCGAGCACCACCACAAA | 69 | 2840 |
| 1339164 | N/A | N/A | 55785 | 55804 | CAGAGCTCTAACACCTGGGA | 11 | 2841 |
| 1339193 | 4329 | 4348 | 94708 | 94727 | GCTGCTTCTAACTTCCAGAA | 26 | 2842 |
| 1339197 | N/A | N/A | 50558 | 50577 | TTGTCACTGTCCACCAGGGC | 31 | 2843 |
| 1339203 | N/A | N/A | 51907 | 51926 | TCCGTCACACCCAGCAGACA | 48 | 2844 |
| 1339204 | N/A | N/A | 19887 | 19906 | ATGCCAGACTCACCCAACCC | 50 | 2845 |
| 1339233 | N/A | N/A | 39301 | 39320 | GCCCAACCATCCCCAGAGGA | 63 | 2846 |
| 1339237 | N/A | N/A | 60880 | 60899 | GCTGGAGGCCCTCGCAGCTC | 39 | 2847 |
| 1339240 | N/A | N/A | 8840 | 8859 | GCTCAGAAAATGACCAACTC | 40 | 2848 |
| | | | 37284 | 37303 | | | |
| 1339245 | N/A | N/A | 87149 | 87168 | CCCGTATTCTTCCTGAAGAC | 28 | 2849 |
| 1339257 | N/A | N/A | 75811 | 75830 | CTGTTGTCCCCAGCAGGCCA | 179 | 2850 |
| 1339273 | N/A | N/A | 68939 | 68958 | GAACTCTACCTTCAGCCCGT | 48 | 2851 |
| 1339317 | N/A | N/A | 92695 | 92714 | TCTGCCCGTCCTCTCCCCTT | 40 | 2852 |
| 1339366 | N/A | N/A | 24676 | 24695 | GATGCTCTCACCAGGAGCCT | 45 | 2853 |
| 1339387 | N/A | N/A | 30630 | 30649 | GCTGCGGCCCTCACTCTCCG | 51 | 2854 |
| 1339400 | N/A | N/A | 91720 | 91739 | CTCCGACCTTTACTCCAGGC | 24 | 2855 |
| 1339452 | N/A | N/A | 82963 | 82982 | GACCCAAACTTCAAGCCACC | 61 | 2856 |
| 1339485 | N/A | N/A | 54406 | 54425 | CAGTTCTCCTTCTCAAACTC | 21 | 2857 |
| 1339495 | N/A | N/A | 87859 | 87878 | CTGGGACCCATCTGGACCCC | 32 | 2858 |
| 1339510 | N/A | N/A | 86300 | 86319 | TGCCAGGCACCCATAGGTCA | 21 | 2859 |
| 1339540 | N/A | N/A | 68401 | 68420 | CTAGATGGTCCACCTTGAAT | 75 | 2860 |
| 1339555 | N/A | N/A | 65327 | 65346 | TCAAGGGCTTTTACTGGTGC | 22 | 2861 |
| 1339562 | N/A | N/A | 27832 | 27851 | GCATATATTCAATCAACTTA | 38 | 2862 |
| 1339627 | N/A | N/A | 37502 | 37521 | GTTTCTGACCTCACTAGGCC | 30 | 2863 |

TABLE 38
Reduction of KCNT1 RNA by 4,000 nM 5-10-5 MOE gapmers with a mixed backbone measured
with human KCNT1 primer probe set RTS39496

| | SEQ | SEQ | SEQ | SEQ | | | |
|---|---|---|---|---|---|---|---|
| | ID | ID | ID | ID | | | |
| | NO: 1 | NO: 1 | NO: 2 | NO: 2 | | KCNT1 | SEQ |
| Compound | Start | Stop | Start | Stop | | (% | ID |
| Number | Site | Site | Site | Site | Sequence (5′ to 3′) | UTC) | No. |
| 1080855 | 3854 | 3873 | 94233 | 94252 | GTCACGCTAGTGCCACCGTG | 20 | 283 |
| 1081057 | N/A | N/A | 67950 | 67969 | TGGTCCACCCCAGACGATCC | 13 | 161 |
| | | | 68546 | 68565 | | | |
| 1337381 | N/A | N/A | 17747 | 17766 | TTCATGGTCCTCATGGATAC | 24 | 2864 |
| 1337408 | N/A | N/A | 18201 | 18220 | AGGATCTCCCAGGGCTGCCG | 20 | 2865 |
| 1337413 | 4525 | 4544 | 94904 | 94923 | AAGGTAAGTGTAAAATGGTC | 51 | 2866 |
| 1337438 | N/A | N/A | 39255 | 39274 | AGCACCAGACACCAGCCCAA | 51 | 2867 |
| 1337440 | N/A | N/A | 8835 | 8854 | GAAAATGACCAACTCACTGG | 81 | 2868 |
| | | | 37279 | 37298 | | | |
| 1337455 | N/A | N/A | 27237 | 27256 | GGCCCTGTTCAAACACTATA | 54 | 2869 |
| 1337524 | N/A | N/A | 90922 | 90941 | TCAGGAGGCCCTTCAAGCTC | 42 | 2870 |
| 1337553 | N/A | N/A | 47080 | 47099 | AACATCGCCATTCCCAGAGT | 101 | 2871 |
| 1337564 | 3839 | 3858 | 94218 | 94237 | CCGTGTCCTCACACGCTCCT | 15 | 2872 |
| 1337634 | N/A | N/A | 85147 | 85166 | GAGGCGGTACATCCACGGGC | 50 | 2873 |
| 1337642 | N/A | N/A | 45676 | 45695 | GCAGACGCATCCATTTCCTC | 47 | 2874 |
| 1337651 | 4299 | 4318 | 94678 | 94697 | ACAGCAAACAGCCCAGGGTC | 46 | 2875 |
| 1337652 | N/A | N/A | 57161 | 57180 | AGGGCACTCACCTGGATCGC | 92 | 2876 |
| 1337994 | N/A | N/A | 31721 | 31740 | CCCAACTTCCACTTTGCAAA | 69 | 2877 |
| 1337999 | N/A | N/A | 32359 | 32378 | CGTGTGGTCCCCCTCGCCAC | 52 | 2878 |
| 1338069 | N/A | N/A | 82863 | 82882 | TCCCTGTCCACACAGGGTCA | 80 | 2879 |
| 1338086 | N/A | N/A | 33841 | 33860 | ATATGGCTCCTACTCCACCT | 47 | 2880 |
| 1338092 | N/A | N/A | 86291 | 86310 | CC CATAGGTCAAAAAGGGCC | 39 | 2881 |
| 1338100 | N/A | N/A | 24542 | 24561 | CGAGGCATAAACACACTTAC | 31 | 2882 |
| 1338179 | N/A | N/A | 60826 | 60845 | ACCCTGCTTTCAGCTGGGCC | 57 | 2883 |
| 1338182 | N/A | N/A | 37492 | 37511 | TCACTAGGCCTCCATGCACC | 60 | 2884 |
| 1338208 | N/A | N/A | 23015 | 23034 | CCCTAAACCACCACTGCCCC | 85 | 2885 |
| 1338264 | N/A | N/A | 26411 | 26430 | TCTCTGGCCACCACAAGGCT | 66 | 2886 |
| 1338288 | N/A | N/A | 78690 | 78709 | GCCACAGATTATAACCCACA | 66 | 2887 |
| 1338321 | N/A | N/A | 36574 | 36593 | GACAAGAGAACATCTGTGCC | 38 | 2888 |
| 1338335 | N/A | N/A | 31121 | 31140 | CTCAGCGAACTTAATTATAT | 39 | 2889 |
| 1338336 | N/A | N/A | 55749 | 55768 | CCCTCCCCACCTACTGCGGA | 44 | 2890 |
| 1338400 | N/A | N/A | 54394 | 54413 | TCAAACTCTCCTAGTGGGTT | 21 | 2891 |
| 1338403 | N/A | N/A | 93323 | 93342 | CAGATCTTCATAGCAACCCA | 35 | 2892 |
| 1338425 | N/A | N/A | 20548 | 20567 | GGCACTTCCACCTTACCCAG | 24 | 2893 |
| 1338434 | N/A | N/A | 18669 | 18688 | GGCACACAACCCATGTGCCC | 83 | 2894 |
| 1338438 | N/A | N/A | 42376 | 42395 | CCCAAGTCCCATAAGATGCT | 41 | 2895 |
| 1338471 | N/A | N/A | 34971 | 34990 | TGCCGGAATCCTCACCCTTA | 40 | 2896 |
| 1338476 | N/A | N/A | 51894 | 51913 | GCAGACAGCCGACCCAGCCT | 50 | 2897 |
| 1338515 | N/A | N/A | 75728 | 75747 | TGGGCTGTCATTACAGTGTG | 36 | 2898 |
| 1338517 | N/A | N/A | 50534 | 50553 | GGCTGTGACACCCAGTGGGT | 45 | 2899 |
| 1338518 | N/A | N/A | 44948 | 44967 | CCCAGAGGCACCAGCGGGTA | 75 | 2900 |
| 1338576 | N/A | N/A | 76709 | 76728 | ACATGCGCACAGAAATGAAC | 80 | 2901 |
| 1338636 | N/A | N/A | 74163 | 74182 | GGCAGAGTGCCTACTGCGCA | 41 | 2902 |
| 1338657 | N/A | N/A | 66019 | 66038 | CTCCACTGCCTTGCCACACA | 24 | 2903 |
| 1338694 | N/A | N/A | 63147 | 63166 | GGTGAATCAAAGCCAAGCCG | 14 | 2904 |
| 1338818 | N/A | N/A | 82024 | 82043 | AGAAAGCCAATTCCAGCTCA | 66 | 2905 |
| 1338824 | N/A | N/A | 71123 | 71142 | GCGCCCTGCCCCAGACGCAC | 16 | 2906 |
| | | | 71163 | 71182 | | | |
| | | | 71283 | 71302 | | | |
| 1338826 | N/A | N/A | 89623 | 89642 | CCTCTGAGTCTCCTTCGGGC | 38 | 2907 |
| 1338886 | N/A | N/A | 59222 | 59241 | GGCTCACCCACCGTGATGAT | 65 | 2908 |
| 1338967 | N/A | N/A | 19884 | 19903 | CCAGACTCACCCAACCCTAC | 52 | 2909 |
| 1338999 | N/A | N/A | 77546 | 77565 | TGTGGCTCTCCCTTGCAGAA | 49 | 2910 |
| 1339081 | N/A | N/A | 62094 | 62113 | GACCCACCATCTCCCCAGAA | 61 | 2911 |
| 1339102 | N/A | N/A | 43242 | 43261 | TGCATCTCCCGATATAGCCC | 32 | 2912 |
| 1339117 | N/A | N/A | 65191 | 65210 | GTCAGCGGCATCACTGTCCC | 61 | 2913 |
| 1339184 | N/A | N/A | 56450 | 56469 | GCAGGTGCCTTCCTTTGCCG | 9 | 2914 |
| 1339192 | N/A | N/A | 91718 | 91737 | CCGACCTTTACTCCAGGCCT | 12 | 2915 |
| 1339201 | N/A | N/A | 68299 | 68318 | CAGCCCACCCCAGATGGTCC | 42 | 2916 |
| 1339229 | N/A | N/A | 29746 | 29765 | GTGGGCCCCACCTCTGTCCG | 41 | 2917 |
| 1339242 | N/A | N/A | 21430 | 21449 | CATGCATCCCCCGACATACA | 52 | 2918 |
| 1339270 | N/A | N/A | 87844 | 87863 | ACCCCAGCACATCCTGGCCT | 41 | 2919 |
| 1339296 | N/A | N/A | 79253 | 79272 | TCCCAGACCCCTCACCAAAC | 103 | 2920 |
| 1339314 | N/A | N/A | 48099 | 48118 | GCACCACCACAAAAAGGAGA | 64 | 2921 |
| 1339328 | N/A | N/A | 30557 | 30576 | GGGAGATGCCTCCCACTTCC | 69 | 2922 |
| 1339386 | N/A | N/A | 69863 | 69882 | CCCATGGTGCTTCCTAGGGC | 16 | 2923 |
| 1339412 | N/A | N/A | 92479 | 92498 | GCTTCAGGCCTTTCGCACAC | 17 | 2924 |
| 1339425 | N/A | N/A | 68901 | 68920 | AGCAGCTGACTCTCCCGCCC | 37 | 2925 |
| 1339459 | N/A | N/A | 33010 | 33029 | AATTGCTAAACCACACTTTT | 43 | 2926 |
| 1339473 | N/A | N/A | 48764 | 48783 | ACCATCGCCCCACACTCCAC | 69 | 2927 |
| 1339503 | N/A | N/A | 19224 | 19243 | CCCTCTCATCCTATAGACAC | 54 | 2928 |
| | | | 19270 | 19289 | | | |
| 1339548 | N/A | N/A | 40302 | 40321 | AGCTCCATTACCTCTGCTCT | 29 | 2929 |
| 1339556 | N/A | N/A | 49203 | 49222 | TGACCAGACCCCAGAATCTC | 66 | 2930 |
| 1339559 | N/A | N/A | 22303 | 22322 | AGACATCCCCACCGCAACCC | 69 | 2931 |
| 1339608 | N/A | N/A | 53303 | 53322 | GCTCCAGCCTTTCCGTGGAC | 9 | 2932 |
| 1339611 | N/A | N/A | 40862 | 40881 | CGCTGTCTAATCAGCTCCCA | 40 | 2933 |
| 1339623 | N/A | N/A | 27828 | 27847 | ATATTCAATCAACTTAGGAC | 61 | 2934 |
| 1339633 | N/A | N/A | 58431 | 58450 | TGAAAGACCCTCTCTGGTCT | 80 | 2935 |
| 1339634 | N/A | N/A | 84245 | 84264 | GCATGTCACCCCACCAGCAG | 61 | 2936 |
| 1339636 | N/A | N/A | 23675 | 23694 | CCTGCCAGAACTTTTGGACA | 41 | 2937 |
| 1339638 | N/A | N/A | 72652 | 72671 | GGGTCAGCCCACAAGCCTCA | 48 | 2938 |
| 1339661 | N/A | N/A | 87135 | 87154 | GAAGACTCCCCTGAGCCTCT | 12 | 2939 |

### Example 2: Effect of Modified Oligonucleotides on Human KCNT1 RNA In Vitro, Multiple Doses

[0297] Modified oligonucleotides selected from the example above were tested at various doses in SH-SY5Y cells. Cultured SH-SYSY cells at a density of 20,000 cells per well were treated with modified oligonucleotide at various doses by electroporation, as specified in the tables below. After a treatment period of approximately 24 hours, total RNA was isolated from the cells and KCNT1 RNA levels were measured by quantitative real-time RTPCR. Human KCNT1 primer probe set RTS39508 (forward sequence GTCAACGTGCAGACCATGT, designated herein as SEQ ID NO: 11; reverse sequence TCGCTCCCTCTTTTCTAGTTTG, designated herein as SEQ ID NO: 12; probe sequence AGCTCACCCACCCTTCCAACATG, designated herein as SEQ ID NO: 13) was used to measure RNA levels presented in Tables 39-42 and human KCNT1 primer probe set RTS39496 (forward sequence CAGGTGGAGTTCTACGTCAA, designated herein as SEQ ID NO: 14; reverse sequence GAGAAGTTGAACAGCCGGAT, designated herein as SEQ ID NO: 15, probe sequence TGATGAAGAACAGCTTGAGCCGCT, designated herein as SEQ ID NO: 16) was used to measure RNA levels presented in Tables 43-60. Each table represents results from an individual assay plate. KCNT1 RNA levels were adjusted according to total RNA content, as measured by RIBOGREEN®. Results are presented in the tables below as percent reduction of the amount of KCNT1 RNA, relative to untreated control. The half maximal inhibitory concentration (IC₅₀) of each modified oligonucleotide is also presented. IC₅₀ was calculated using a linear regression on a log/linear plot of the data in Excel. In some cases, when the IC₅₀ could not be reliably calculated, it is indicated as N.C. (Not Calculated).

TABLE 39
Dose-dependent percent reduction of human KCNT1
RNA by modified oligonucleotides measured with
human KCNT1 primer probe set RTS39508

| | % UTC | | | | |
|---|---|---|---|---|---|
| Compound | 94 | 375 | 1500 | 6000 | |
| No. | nM | nM | nM | nM | IC50 (μM) |
| 1080715 | 88 | 79 | 46 | 25 | 1.4 |
| 1080740 | 76 | 54 | 46 | 14 | 0.6 |
| 1080846 | 98 | 106 | 32 | 17 | 1.3 |
| 1080847 | 84 | 63 | 36 | 23 | 0.8 |
| 1080852 | 76 | 62 | 33 | 17 | 0.6 |
| 1080858 | 101 | 83 | 57 | 25 | 1.8 |
| 1080859 | 79 | 51 | 30 | 19 | 0.5 |
| 1080865 | 117 | 85 | 50 | 24 | 1.7 |
| 1080888 | 65 | 53 | 26 | 15 | 0.3 |
| 1080889 | 72 | 46 | 23 | 16 | 0.3 |
| 1080894 | 80 | 74 | 36 | 16 | 0.8 |
| 1080895 | 85 | 74 | 39 | 15 | 0.9 |
| 1080978 | 85 | 67 | 49 | 26 | 1.2 |
| 1080996 | 91 | 85 | 72 | 17 | 2.0 |
| 1081080 | 96 | 92 | 43 | 21 | 1.4 |
| 1081092 | 66 | 56 | 54 | 15 | 0.6 |
| 1081093 | 104 | 55 | 20 | 12 | 0.7 |
| 1081135 | 83 | 57 | 28 | 13 | 0.6 |
| 1081148 | 97 | 73 | 42 | 32 | 1.5 |

TABLE 40
Dose-dependent percent reduction of human KCNT1
RNA by modified oligonucleotides measured with
human KCNT1 primer probe set RTS39508

| | % UTC | | | | |
|---|---|---|---|---|---|
| Compound | 94 | 375 | 1500 | 6000 | |
| No. | nM | nM | nM | nM | IC50 (μM) |
| 1080722 | 106 | 109 | 48 | 36 | 2.6 |
| 1080723 | 90 | 54 | 28 | 13 | 0.6 |
| 1080741 | 98 | 111 | 61 | 35 | 3.5 |
| 1080753 | 135 | 108 | 62 | 26 | 2.6 |
| 1080818 | 76 | 53 | 41 | 19 | 0.6 |
| 1080854 | 100 | 74 | 44 | 16 | 1.1 |
| 1080878 | 71 | 53 | 31 | 15 | 0.4 |
| 1080890 | 86 | 77 | 44 | 25 | 1.3 |
| 1080896 | 83 | 88 | 49 | 22 | 1.4 |
| 1080902 | 112 | 92 | 46 | 18 | 1.5 |
| 1080992 | 75 | 84 | 72 | 42 | N.C. |
| 1081040 | 88 | 88 | 40 | 14 | 1.1 |
| 1081052 | 76 | 68 | 32 | 20 | 0.7 |
| 1081057 | 72 | 61 | 24 | 16 | 0.5 |
| 1081076 | 76 | 77 | 55 | 26 | 1.5 |
| 1081100 | 81 | 75 | 31 | 12 | 0.7 |
| 1081136 | 94 | 72 | 46 | 16 | 1.1 |
| 1081147 | 79 | 74 | 34 | 13 | 0.8 |
| 1081148 | 105 | 89 | 56 | 25 | 2.0 |

TABLE 41
Dose-dependent percent reduction of human KCNT1
RNA by modified oligonucleotides measured with
human KCNT1 primer probe set RTS39508

| | % UTC | | | | |
|---|---|---|---|---|---|
| Compound | 94 | 375 | 1500 | 6000 | |
| No. | nM | nM | nM | nM | IC50 (μM) |
| 1080706 | 97 | 59 | 58 | 29 | 1.5 |
| 1080806 | 131 | 138 | 126 | 71 | N.C. |
| 1080819 | 69 | 67 | 59 | 29 | 1.5 |
| 1080831 | 115 | 71 | 37 | 37 | 1.6 |
| 1080855 | 53 | 39 | 33 | 16 | 0.1 |
| 1080862 | 77 | 41 | 15 | 9 | 0.3 |
| 1080891 | 76 | 52 | 29 | 16 | 0.5 |
| 1080892 | 140 | 66 | 33 | 9 | 1.1 |
| 1080903 | 97 | 55 | 31 | 19 | 0.8 |
| 1080944 | 120 | 123 | 103 | 85 | N.C. |
| 1080952 | 132 | 76 | 53 | 23 | 1.7 |
| 1080962 | 80 | 122 | 76 | 43 | N.C. |
| 1081016 | 98 | 95 | 77 | 59 | N.C. |
| 1081023 | 80 | 91 | 38 | 31 | 1.5 |
| 1081028 | 104 | 112 | 72 | 29 | 3.4 |
| 1081064 | 107 | 97 | 55 | 33 | 2.5 |
| 1081089 | 88 | 66 | 28 | 15 | 0.7 |
| 1081107 | 84 | 82 | 52 | 36 | 2.2 |
| 1081148 | 88 | 79 | 66 | 23 | 1.9 |

TABLE 42
Dose-dependent percent reduction of human KCNT1
RNA by modified oligonucleotides measured with
human KCNT1 primer probe set RTS39508

| | % UTC | | | | |
|---|---|---|---|---|---|
| Compound | 94 | 375 | 1500 | 6000 | |
| No. | nM | nM | nM | nM | IC50 (μM) |
| 1080707 | 101 | 96 | 74 | 29 | 3.2 |
| 1080720 | 99 | 57 | 26 | 15 | 0.7 |
| 1080779 | 74 | 87 | 46 | 21 | 1.2 |
| 1080821 | 92 | 91 | 63 | 18 | 1.8 |
| 1080844 | 107 | 111 | 47 | 40 | 2.9 |
| 1080851 | 95 | 50 | 23 | 9 | 0.6 |
| 1080856 | 103 | 52 | 40 | 24 | 1.0 |
| 1080857 | 97 | 61 | 32 | 16 | 0.8 |
| 1080863 | 99 | 56 | 33 | 16 | 0.8 |
| 1080958 | 96 | 95 | 62 | 41 | 3.8 |
| 1080976 | 91 | 100 | 66 | 33 | 3.3 |
| 1080977 | 163 | 92 | 60 | 18 | 2.0 |
| 1081043 | 81 | 67 | 41 | 16 | 0.8 |
| 1081048 | 124 | 120 | 67 | 33 | 3.4 |
| 1081072 | 105 | 89 | 69 | 47 | 5.4 |
| 1081084 | 111 | 75 | 28 | 21 | 1.1 |
| 1081085 | 67 | 56 | 29 | 8 | 0.4 |
| 1081145 | 77 | 44 | 24 | 11 | 0.4 |
| 1081148 | 114 | 89 | 50 | 34 | 2.2 |

TABLE 43
Dose-dependent percent reduction of human KCNT1
RNA by modified oligonucleotides measured with
human KCNT1 primer probe set RTS39496

| | KCNT1 (% UTC) | | | | |
|---|---|---|---|---|---|
| Compound | 78 | 313 | 1250 | 5000 | |
| Number | nM | nM | nM | nM | IC₅₀ μM |
| 1080855 | 110 | 52 | 35 | 36 | 1.0 |
| 1337226 | 65 | 49 | 35 | 23 | 0.3 |
| 1337327 | 58 | 38 | 19 | 23 | 0.1 |
| 1337329 | 62 | 47 | 25 | 15 | 0.2 |
| 1337332 | 75 | 36 | 24 | 7 | 0.3 |
| 1337575 | 84 | 65 | 30 | 13 | 0.6 |
| 1338042 | 99 | 56 | 28 | 6 | 0.6 |
| 1338312 | 90 | 62 | 22 | 11 | 0.5 |
| 1338475 | 78 | 37 | 31 | 9 | 0.3 |
| 1338533 | 44 | 48 | 37 | 16 | <0.1 |
| 1338584 | 109 | 58 | 29 | 24 | 0.8 |
| 1339151 | 97 | 88 | 47 | 26 | 1.4 |
| 1339156 | 93 | 70 | 19 | 24 | 0.7 |
| 1339160 | 89 | 87 | 39 | 26 | 1.1 |
| 1339168 | 91 | 83 | 47 | 33 | 1.5 |
| 1339194 | 89 | 59 | 28 | 16 | 0.6 |
| 1339451 | 95 | 77 | 41 | 21 | 1.0 |
| 1339481 | 77 | 47 | 16 | 8 | 0.3 |
| 1339491 | 85 | 60 | 48 | 14 | 0.7 |

TABLE 44
Dose-dependent percent reduction of human KCNT1
RNA by modified oligonucleotides measured with
human KCNT1 primer probe set RTS39496

| | KCNT1 (% UTC) | | | | |
|---|---|---|---|---|---|
| Compound | 78 | 312 | 1250 | 5000 | |
| Number | nM | nM | nM | nM | IC₅₀ μM |
| 1080855 | 82 | 49 | 22 | 19 | 0.4 |
| 1337259 | 76 | 67 | 41 | 12 | 0.6 |
| 1337266 | 88 | 63 | 34 | 14 | 0.6 |
| 1337483 | 67 | 56 | 36 | 26 | 0.4 |
| 1337702 | 78 | 65 | 36 | 22 | 0.6 |
| 1337728 | 69 | 63 | 29 | 16 | 0.4 |
| 1337794 | 84 | 32 | 12 | 3 | 0.2 |
| 1337803 | 81 | 46 | 23 | 7 | 0.3 |
| 1338185 | 66 | 60 | 34 | 22 | 0.4 |
| 1338229 | 64 | 44 | 20 | 13 | 0.2 |
| 1338679 | 103 | 90 | 52 | 36 | 2.0 |
| 1338911 | 87 | 68 | 35 | 17 | 0.7 |
| 1338969 | 78 | 50 | 32 | 10 | 0.4 |
| 1339055 | 92 | 58 | 29 | 16 | 0.6 |
| 1339128 | 95 | 88 | 56 | 26 | 1.6 |
| 1339372 | 86 | 50 | 23 | 9 | 0.4 |
| 1339479 | 83 | 56 | 27 | 22 | 0.5 |
| 1339525 | 65 | 46 | 14 | 14 | 0.2 |
| 1339573 | 91 | 72 | 35 | 29 | 1.0 |

TABLE 45
Dose-dependent percent reduction of human KCNT1
RNA by modified oligonucleotides measured with
human KCNT1 primer probe set RTS39496

| | KCNT1 (% UTC) | | | | |
|---|---|---|---|---|---|
| Compound | 78 | 312 | 1250 | 5000 | |
| Number | nM | nM | nM | nM | IC₅₀ μM |
| 1080855 | 110 | 49 | 22 | 23 | 0.7 |
| 1080862 | 73 | 42 | 23 | 17 | 0.3 |
| 1080878 | 84 | 68 | 36 | 22 | 0.7 |
| 1337279 | 98 | 81 | 52 | 20 | 1.2 |
| 1337488 | 83 | 82 | 35 | 15 | 0.8 |
| 1337603 | 98 | 73 | 24 | 15 | 0.7 |
| 1337640 | 102 | 77 | 48 | 25 | 1.2 |
| 1337648 | 59 | 32 | 25 | 14 | 0.1 |
| 1337681 | 73 | 69 | 43 | 10 | 0.6 |
| 1337837 | 77 | 81 | 35 | 14 | 0.7 |
| 1337916 | 91 | 72 | 46 | 17 | 0.9 |
| 1338005 | 94 | 70 | 30 | 21 | 0.8 |
| 1338107 | 97 | 71 | 35 | 21 | 0.9 |
| 1338237 | 84 | 65 | 33 | 18 | 0.6 |
| 1338313 | 79 | 52 | 32 | 12 | 0.4 |
| 1338333 | 81 | 62 | 33 | 16 | 0.6 |
| 1338427 | 100 | 85 | 31 | 19 | 0.9 |
| 1338577 | 111 | 52 | 31 | 25 | 0.8 |
| 1339030 | 105 | 75 | 32 | 23 | 1.0 |

TABLE 46
Dose-dependent percent reduction of human KCNT1
RNA by modified oligonucleotides measured with
human KCNT1 primer probe set RTS39496

| | KCNT1 (% UTC) | | | | |
|---|---|---|---|---|---|
| Compound | 78 | 313 | 1250 | 5000 | |
| Number | nM | nM | nM | nM | IC₅₀ μM |
| 1080855 | 85 | 48 | 22 | 14 | 0.4 |
| 1081085 | 73 | 31 | 13 | 7 | 0.2 |
| 1337229 | 112 | 91 | 64 | 28 | 2.1 |
| 1337304 | 72 | 38 | 15 | 6 | 0.2 |
| 1337393 | 125 | 72 | 20 | 11 | 0.8 |
| 1337500 | 96 | 49 | 28 | 16 | 0.5 |
| 1337618 | 57 | 35 | 10 | 9 | 0.1 |
| 1337714 | 106 | 63 | 39 | 14 | 0.8 |
| 1338087 | 83 | 71 | 32 | 11 | 0.6 |
| 1338188 | 84 | 75 | 50 | 30 | 1.3 |
| 1338537 | 77 | 46 | 36 | 20 | 0.4 |
| 1338574 | 75 | 56 | 43 | 15 | 0.5 |
| 1338660 | 88 | 70 | 24 | 6 | 0.5 |
| 1338686 | 87 | 57 | 26 | 8 | 0.5 |
| 1338800 | 60 | 35 | 10 | 4 | 0.1 |
| 1338887 | 107 | 86 | 54 | 27 | 1.6 |
| 1338990 | 97 | 72 | 39 | 27 | 1.0 |
| 1339227 | 76 | 42 | 22 | 7 | 0.3 |
| 1339431 | 101 | 40 | 18 | 12 | 0.4 |

TABLE 47
Dose-dependent percent reduction of human KCNT1
RNA by modified oligonucleotides measured with
human KCNT1 primer probe set RTS39496

| | KCNT1 (% UTC) | | | | |
|---|---|---|---|---|---|
| Compound | 78 | 313 | 1250 | 5000 | |
| Number | nM | nM | nM | nM | IC₅₀ μM |
| 1080855 | 73 | 46 | 19 | 21 | 0.3 |
| 1337542 | 51 | 40 | 17 | 7 | 0.1 |
| 1337683 | 75 | 42 | 14 | 5 | 0.2 |
| 1337722 | 78 | 49 | 27 | 11 | 0.4 |
| 1337814 | 52 | 37 | 26 | 12 | 0.1 |
| 1337976 | 105 | 57 | 25 | 18 | 0.7 |
| 1338215 | 76 | 48 | 29 | 13 | 0.4 |
| 1338315 | 71 | 46 | 26 | 7 | 0.3 |
| 1338356 | 78 | 50 | 23 | 11 | 0.4 |
| 1338442 | 64 | 49 | 18 | 12 | 0.2 |
| 1338453 | 69 | 73 | 24 | 8 | 0.4 |
| 1338784 | 76 | 54 | 24 | 17 | 0.4 |
| 1338789 | 90 | 64 | 25 | 10 | 0.5 |
| 1338823 | 87 | 70 | 37 | 29 | 0.9 |
| 1338830 | 101 | 76 | 42 | 28 | 1.2 |
| 1339073 | 78 | 38 | 18 | 15 | 0.3 |
| 1339312 | 73 | 50 | 22 | 17 | 0.3 |
| 1339437 | 60 | 41 | 26 | 19 | 0.2 |
| 1339529 | 61 | 53 | 20 | 14 | 0.2 |

TABLE 48
Dose-dependent percent reduction of human KCNT1
RNA by modified oligonucleotides measured with
human KCNT1 primer probe set RTS39496

| | KCNT1 (% UTC) | | | | |
|---|---|---|---|---|---|
| Compound | 78 | 313 | 1250 | 5000 | |
| Number | nM | nM | nM | nM | IC₅₀ μM |
| 1080855 | 106 | 58 | 64 | 39 | 2.1 |
| 1337285 | 79 | 70 | 39 | 32 | 0.9 |
| 1337334 | 98 | 80 | 59 | 40 | 2.5 |
| 1337447 | 103 | 99 | 65 | 32 | 2.5 |
| 1337827 | 91 | 86 | 49 | 20 | 1.2 |
| 1337899 | 77 | 57 | 18 | 15 | 0.4 |
| 1337919 | 92 | 83 | 64 | 35 | 2.5 |
| 1338010 | 79 | 57 | 35 | 37 | 0.7 |
| 1338094 | 93 | 85 | 68 | 26 | 1.9 |
| 1338199 | 93 | 65 | 48 | 18 | 0.9 |
| 1338226 | 113 | 94 | 73 | 33 | 2.8 |
| 1338504 | 76 | 54 | 28 | 9 | 0.4 |
| 1339039 | 99 | 107 | 62 | 38 | 3.1 |
| 1339072 | 87 | 77 | 53 | 33 | 1.6 |
| 1339318 | 78 | 50 | 50 | 20 | 0.6 |
| 1339436 | 88 | 82 | 48 | 37 | 1.7 |
| 1339456 | 106 | 88 | 51 | 31 | 1.7 |
| 1339609 | 123 | 113 | 59 | 38 | 2.8 |
| 1339639 | 93 | 72 | 45 | 29 | 1.2 |

TABLE 49
Dose-dependent percent reduction of human KCNT1
RNA by modified oligonucleotides measured with
human KCNT1 primer probe set RTS39496

| | KCNT1 (% UTC) | | | | |
|---|---|---|---|---|---|
| Compound | 78 | 313 | 1250 | 5000 | |
| Number | nM | nM | nM | nM | IC₅₀ μM |
| 1080855 | 102 | 51 | 33 | 15 | 0.6 |
| 1080889 | 65 | 48 | 28 | 8 | 0.3 |
| 1337223 | 93 | 49 | 23 | 6 | 0.4 |
| 1337278 | 91 | 92 | 59 | 33 | 2.2 |
| 1337320 | 78 | 40 | 21 | 3 | 0.3 |
| 1337449 | 140 | 63 | 29 | 26 | 1.1 |
| 1337501 | 83 | 47 | 19 | 8 | 0.3 |
| 1337724 | 89 | 69 | 41 | 15 | 0.8 |
| 1338119 | 90 | 86 | 64 | 25 | 1.8 |
| 1338307 | 105 | 97 | 45 | 18 | 1.3 |
| 1338473 | 94 | 50 | 31 | 11 | 0.5 |
| 1338485 | 80 | 60 | 24 | 15 | 0.5 |
| 1338564 | 113 | 96 | 45 | 14 | 1.2 |
| 1338719 | 71 | 42 | 21 | 7 | 0.2 |
| 1338862 | 95 | 62 | 25 | 11 | 0.6 |
| 1338924 | 80 | 49 | 19 | 17 | 0.4 |
| 1339021 | 84 | 52 | 19 | 13 | 0.4 |
| 1339258 | 94 | 59 | 11 | 6 | 0.4 |
| 1339432 | 79 | 35 | 15 | 11 | 0.2 |

TABLE 50
Dose-dependent percent reduction of human KCNT1
RNA by modified oligonucleotides measured with
human KCNT1 primer probe set RTS39496

| | KCNT1 (% UTC) | | | | |
|---|---|---|---|---|---|
| Compound | 78 | 313 | 1250 | 5000 | |
| Number | nM | nM | nM | nM | IC₅₀ μM |
| 855082 | 79 | 51 | 30 | 15 | 0.4 |
| 1080855 | 109 | 74 | 30 | 23 | 1.0 |
| 1337509 | 60 | 37 | 19 | 15 | 0.1 |
| 1337596 | 96 | 53 | 36 | 14 | 0.6 |
| 1337786 | 76 | 62 | 32 | 22 | 0.5 |
| 1338586 | 97 | 80 | 44 | 18 | 1.0 |
| 1338646 | 71 | 62 | 31 | 18 | 0.5 |
| 1338682 | 95 | 83 | 33 | 14 | 0.8 |
| 1338688 | 97 | 73 | 25 | 12 | 0.7 |
| 1338691 | 76 | 56 | 21 | 16 | 0.4 |
| 1338922 | 113 | 77 | 46 | 17 | 1.1 |
| 1338931 | 118 | 76 | 34 | 30 | 1.2 |
| 1338935 | 83 | 60 | 25 | 14 | 0.5 |
| 1338945 | 78 | 43 | 27 | 10 | 0.3 |
| 1338946 | 86 | 76 | 32 | 11 | 0.7 |
| 1338953 | 88 | 62 | 21 | 8 | 0.5 |
| 1339001 | 67 | 40 | 25 | 17 | 0.2 |
| 1339369 | 59 | 42 | 18 | 9 | 0.1 |
| 1339370 | 83 | 50 | 18 | 6 | 0.4 |

TABLE 51
Dose-dependent percent reduction of human KCNT1
RNA by modified oligonucleotides measured with
human KCNT1 primer probe set RTS39496

| | KCNT1 (% UTC) | | | | |
|---|---|---|---|---|---|
| Compound | 78 | 313 | 1250 | 5000 | |
| Number | nM | nM | nM | nM | IC₅₀ μM |
| 1080855 | 103 | 51 | 38 | 14 | 0.7 |
| 1337426 | 84 | 64 | 38 | 14 | 0.6 |
| 1337591 | 109 | 57 | 28 | 16 | 0.7 |
| 1337697 | 47 | 29 | 19 | 11 | <0.1 |
| 1337777 | 63 | 44 | 27 | 18 | 0.2 |
| 1337784 | 83 | 63 | 41 | 25 | 0.8 |
| 1337997 | 102 | 81 | 53 | 37 | 1.9 |
| 1338036 | 77 | 40 | 22 | 10 | 0.3 |
| 1338147 | 95 | 69 | 30 | 17 | 0.7 |
| 1338351 | 85 | 51 | 39 | 26 | 0.6 |
| 1338690 | 78 | 49 | 28 | 18 | 0.4 |
| 1338751 | 65 | 47 | 27 | 17 | 0.2 |
| 1338795 | 65 | 35 | 16 | 26 | 0.1 |
| 1338843 | 75 | 64 | 35 | 12 | 0.5 |
| 1338895 | 85 | 75 | 47 | 22 | 1.0 |
| 1338936 | 60 | 39 | 17 | 15 | 0.1 |
| 1339278 | 81 | 51 | 30 | 9 | 0.4 |
| 1339351 | 77 | 59 | 33 | 12 | 0.5 |
| 1339496 | 79 | 50 | 30 | 4 | 0.4 |

TABLE 52
Dose-dependent percent reduction of human KCNT1
RNA by modified oligonucleotides measured with
human KCNT1 primer probe set RTS39496

| | KCNT1 (% UTC) | | | | |
|---|---|---|---|---|---|
| Compound | 78 | 313 | 1250 | 5000 | |
| Number | nM | nM | nM | nM | IC₅₀ μM |
| 1080855 | 99 | 44 | 27 | 14 | 0.5 |
| 1337314 | 107 | 75 | 26 | 7 | 0.7 |
| 1337421 | 108 | 75 | 54 | 22 | 1.3 |
| 1337445 | 87 | 48 | 19 | 10 | 0.4 |
| 1337482 | 111 | 52 | 31 | 17 | 0.7 |
| 1337757 | 121 | 76 | 29 | 12 | 0.9 |
| 1337812 | 107 | 97 | 37 | 16 | 1.1 |
| 1337825 | 75 | 50 | 29 | 6 | 0.3 |
| 1338068 | 119 | 95 | 64 | 30 | 2.2 |
| 1338116 | 88 | 78 | 35 | 8 | 0.7 |
| 1338378 | 87 | 72 | 32 | 9 | 0.6 |
| 1338491 | 78 | 28 | 12 | 2 | 0.2 |
| 1338650 | 84 | 51 | 26 | 8 | 0.4 |
| 1338742 | 112 | 66 | 25 | 10 | 0.7 |
| 1339058 | 95 | 61 | 36 | 18 | 0.7 |
| 1339191 | 113 | 90 | 62 | 28 | 1.9 |
| 1339308 | 87 | 45 | 19 | 7 | 0.4 |
| 1339329 | 84 | 51 | 27 | 13 | 0.4 |
| 1339531 | 96 | 69 | 32 | 13 | 0.7 |

TABLE 53
Dose-dependent percent reduction of human KCNT1
RNA by modified oligonucleotides measured with
human KCNT1 primer probe set RTS39496

| | KCNT1 (% UTC) | | | | |
|---|---|---|---|---|---|
| Compound | 78 | 313 | 1250 | 5000 | |
| Number | nM | nM | nM | nM | IC₅₀ μM |
| 1080855 | 101 | 57 | 32 | 21 | 0.7 |
| 1080859 | 91 | 62 | 39 | 25 | 0.8 |
| 1337299 | 113 | 75 | 29 | 16 | 0.9 |
| 1337356 | 101 | 104 | 73 | 34 | 3.3 |
| 1337442 | 86 | 53 | 31 | 17 | 0.5 |
| 1337505 | 78 | 54 | 23 | 7 | 0.4 |
| 1338008 | 99 | 79 | 60 | 27 | 1.6 |
| 1338151 | 67 | 54 | 22 | 16 | 0.3 |
| 1338382 | 120 | 70 | 52 | 26 | 1.4 |
| 1338437 | 89 | 72 | 59 | 33 | 1.7 |
| 1338454 | 97 | 53 | 41 | 18 | 0.7 |
| 1338624 | 97 | 87 | 60 | 28 | 1.8 |
| 1338681 | 92 | 63 | 37 | 9 | 0.6 |
| 1338912 | 112 | 72 | 38 | 37 | 1.4 |
| 1339049 | 85 | 52 | 27 | 15 | 0.5 |
| 1339110 | 91 | 65 | 43 | 13 | 0.7 |
| 1339112 | 113 | 71 | 29 | 14 | 0.8 |
| 1339360 | 86 | 72 | 33 | 14 | 0.7 |
| 1339416 | 94 | 93 | 53 | 27 | 1.6 |

TABLE 54
Dose-dependent percent reduction of human KCNT1
RNA by modified oligonucleotides measured with
human KCNT1 primer probe set RTS39496

| | KCNT1 (% UTC) | | | | |
|---|---|---|---|---|---|
| Compound | 78 | 313 | 1250 | 5000 | |
| Number | nM | nM | nM | nM | IC₅₀ μM |
| 1080855 | 113 | 59 | 29 | 20 | 0.8 |
| 1337294 | 77 | 55 | 24 | 22 | 0.4 |
| 1337416 | 75 | 50 | 22 | 8 | 0.3 |
| 1337459 | 55 | 32 | 17 | 13 | 0.1 |
| 1337761 | 90 | 73 | 35 | 16 | 0.8 |
| 1337832 | 91 | 63 | 18 | 21 | 0.6 |
| 1338096 | 91 | 53 | 30 | 12 | 0.5 |
| 1338233 | 76 | 57 | 23 | 21 | 0.4 |
| 1338344 | 88 | 78 | 44 | 16 | 0.9 |
| 1338416 | 82 | 67 | 38 | 15 | 0.6 |
| 1338458 | 86 | 47 | 31 | 17 | 0.5 |
| 1338778 | 82 | 47 | 27 | 17 | 0.4 |
| 1338809 | 78 | 63 | 41 | 17 | 0.6 |
| 1338841 | 35 | 23 | 12 | 7 | <0.1 |
| 1338904 | 105 | 80 | 42 | 18 | 1.1 |
| 1339418 | 75 | 88 | 53 | 25 | 1.4 |
| 1339513 | 74 | 46 | 17 | 16 | 0.3 |
| 1339517 | 50 | 30 | 17 | 7 | <0.1 |
| 1339581 | 86 | 49 | 24 | 21 | 0.5 |

TABLE 55
Dose-dependent percent reduction of human KCNT1
RNA by modified oligonucleotides measured with
human KCNT1 primer probe set RTS39496

| | KCNT1 (% UTC) | | | | |
|---|---|---|---|---|---|
| Compound | 78 | 313 | 1250 | 5000 | |
| Number | nM | nM | nM | nM | IC₅₀ μM |
| 1080855 | 84 | 49 | 35 | 14 | 0.5 |
| 1337235 | 70 | 44 | 30 | 22 | 0.3 |
| 1337374 | 103 | 81 | 44 | 23 | 1.2 |
| 1337379 | 83 | 63 | 46 | 25 | 0.9 |
| 1337566 | 54 | 46 | 19 | 11 | 0.1 |
| 1337841 | 77 | 66 | 44 | 19 | 0.7 |
| 1337870 | 73 | 47 | 23 | 6 | 0.3 |
| 1338013 | 62 | 33 | 14 | 6 | 0.1 |
| 1338170 | 77 | 66 | 32 | 18 | 0.6 |
| 1338184 | 104 | 98 | 52 | 26 | 1.7 |
| 1338337 | 89 | 88 | 73 | 37 | 3.6 |
| 1338484 | 84 | 77 | 50 | 24 | 1.1 |
| 1338891 | 67 | 45 | 25 | 14 | 0.2 |
| 1338991 | 82 | 73 | 47 | 24 | 1.0 |
| 1339152 | 83 | 44 | 27 | 20 | 0.4 |
| 1339254 | 68 | 55 | 27 | 15 | 0.3 |
| 1339315 | 71 | 52 | 23 | 11 | 0.3 |
| 1339401 | 88 | 42 | 36 | 16 | 0.5 |
| 1339493 | 72 | 62 | 33 | 10 | 0.4 |

TABLE 56
Dose-dependent percent reduction of human KCNT1
RNA by modified oligonucleotides measured with
human KCNT1 primer probe set RTS39496

| | KCNT1 (% UTC) | | | | |
|---|---|---|---|---|---|
| Compound | 78 | 313 | 1250 | 5000 | |
| Number | nM | nM | nM | nM | IC₅₀ μM |
| 1080855 | 117 | 37 | 14 | 10 | 0.5 |
| 1337282 | 80 | 64 | 28 | 14 | 0.5 |
| 1337399 | 47 | 54 | 29 | 10 | 0.1 |
| 1337637 | 88 | 52 | 34 | 14 | 0.5 |
| 1337940 | 64 | 36 | 20 | 13 | 0.2 |
| 1337972 | 96 | 49 | 21 | 7 | 0.5 |
| 1338045 | 85 | 56 | 42 | 14 | 0.6 |
| 1338190 | 78 | 54 | 23 | 6 | 0.4 |
| 1338630 | 78 | 50 | 12 | 4 | 0.3 |
| 1338994 | 73 | 64 | 24 | 12 | 0.4 |
| 1339000 | 67 | 37 | 17 | 4 | 0.2 |
| 1339041 | 63 | 39 | 11 | 7 | 0.2 |
| 1339092 | 85 | 56 | 24 | 5 | 0.4 |
| 1339188 | 145 | 99 | 43 | 12 | 1.3 |
| 1339247 | 81 | 58 | 17 | 10 | 0.4 |
| 1339255 | 83 | 51 | 17 | 8 | 0.4 |
| 1339409 | 72 | 40 | 21 | 9 | 0.2 |
| 1339532 | 66 | 65 | 17 | 3 | 0.3 |
| 1339612 | 50 | 25 | 19 | 7 | <0.1 |

TABLE 57
Dose-dependent percent reduction of human KCNT1
RNA by modified oligonucleotides measured with
human KCNT1 primer probe set RTS39496

| | KCNT1 (% UTC) | | | | |
|---|---|---|---|---|---|
| Compound | 78 | 313 | 1250 | 5000 | |
| Number | nM | nM | nM | nM | IC₅₀ μM |
| 1080855 | 77 | 42 | 29 | 19 | 0.3 |
| 1081135 | 93 | 38 | 35 | 11 | 0.5 |
| 1337627 | 69 | 39 | 25 | 11 | 0.2 |
| 1337706 | 77 | 102 | 39 | 20 | 1.1 |
| 1337715 | 72 | 74 | 48 | 27 | 1.0 |
| 1337783 | 98 | 71 | 41 | 18 | 0.9 |
| 1337867 | 80 | 70 | 43 | 22 | 0.8 |
| 1337970 | 86 | 41 | 6 | 9 | 0.3 |
| 1338319 | 69 | 47 | 33 | 17 | 0.3 |
| 1338510 | 103 | 82 | 56 | 24 | 1.5 |
| 1338524 | 90 | 73 | 43 | 27 | 1.0 |
| 1338652 | 72 | 64 | 36 | 10 | 0.5 |
| 1338693 | 74 | 65 | 36 | 21 | 0.6 |
| 1338850 | 96 | 76 | 30 | 24 | 0.9 |
| 1338925 | 100 | 98 | 60 | 14 | 1.5 |
| 1339068 | 94 | 86 | 49 | 25 | 1.4 |
| 1339195 | 88 | 52 | 22 | 12 | 0.4 |
| 1339335 | 69 | 42 | 18 | 11 | 0.2 |
| 1339643 | 72 | 47 | 25 | 16 | 0.3 |

TABLE 58
Dose-dependent percent reduction of human KCNT1
RNA by modified oligonucleotides measured with
human KCNT1 primer probe set RTS39496

| | KCNT1 (% UTC) | | | | |
|---|---|---|---|---|---|
| Compound | 78 | 313 | 1250 | 5000 | |
| Number | nM | nM | nM | nM | IC₅₀ μM |
| 1080740 | 120 | 67 | 34 | 13 | 0.9 |
| 1080818 | 104 | 76 | 31 | 14 | 0.8 |
| 1080855 | 66 | 58 | 25 | 29 | 0.4 |
| 1337252 | 90 | 75 | 52 | 20 | 1.1 |
| 1337265 | 72 | 62 | 33 | 28 | 0.6 |
| 1337460 | 99 | 90 | 64 | 49 | 4.7 |
| 1337518 | 96 | 62 | 56 | 15 | 0.9 |
| 1337657 | 76 | 56 | 21 | 23 | 0.4 |
| 1337792 | 112 | 91 | 44 | 51 | 2.7 |
| 1337887 | 73 | 53 | 33 | 12 | 0.4 |
| 1337982 | 101 | 90 | 36 | 16 | 1.0 |
| 1338366 | 94 | 112 | 51 | 23 | 1.7 |
| 1338394 | 117 | 104 | 85 | 46 | >5.0 |
| 1338692 | 83 | 59 | 27 | 19 | 0.5 |
| 1338740 | 90 | 64 | 45 | 23 | 0.9 |
| 1338894 | 81 | 67 | 51 | 23 | 0.9 |
| 1339012 | 116 | 73 | 28 | 20 | 0.9 |
| 1339236 | 105 | 43 | 21 | 8 | 0.5 |
| 1339572 | 105 | 71 | 35 | 43 | 1.4 |

TABLE 59
Dose-dependent percent reduction of human KCNT1
RNA by modified oligonucleotides measured with
human KCNT1 primer probe set RTS39496

| | KCNT1 (% UTC) | | | | |
|---|---|---|---|---|---|
| Compound | 78 | 313 | 1250 | 5000 | |
| Number | nM | nM | nM | nM | IC₅₀ μM |
| 1080852 | 117 | 69 | 40 | 55 | 2.3 |
| 1080855 | 109 | 69 | 45 | 31 | 1.3 |
| 1081145 | 84 | 63 | 48 | 19 | 0.8 |
| 1337306 | 99 | 80 | 44 | 26 | 1.2 |
| 1337504 | 82 | 52 | 41 | 13 | 0.5 |
| 1337897 | 115 | 84 | 53 | 29 | 1.6 |
| 1338224 | 95 | 64 | 34 | 20 | 0.7 |
| 1338246 | 95 | 95 | 63 | 38 | 2.9 |
| 1338588 | 69 | 58 | 36 | 23 | 0.5 |
| 1338965 | 95 | 97 | 43 | 19 | 1.2 |
| 1339078 | 81 | 56 | 50 | 28 | 0.9 |
| 1339164 | 78 | 40 | 21 | 12 | 0.3 |
| 1339184 | 79 | 53 | 22 | 22 | 0.4 |
| 1339400 | 89 | 69 | 33 | 23 | 0.8 |
| 1339485 | 113 | 70 | 31 | 14 | 0.8 |
| 1339510 | 121 | 79 | 51 | 28 | 1.5 |
| 1339555 | 139 | 87 | 37 | 23 | 1.3 |
| 1339608 | 92 | 38 | 17 | 12 | 0.4 |
| 1339620 | 115 | 72 | 52 | 22 | 1.3 |

TABLE 60
Dose-dependent percent reduction of human KCNT1
RNA by modified oligonucleotides measured with
human KCNT1 primer probe set RTS39496

| | KCNT1 (% UTC) | | | | |
|---|---|---|---|---|---|
| Compound | 78 | 313 | 1250 | 5000 | |
| Number | nM | nM | nM | nM | IC₅₀ μM |
| 1080855 | 165 | 60 | 35 | 16 | 1.1 |
| 1081057 | 69 | 49 | 20 | 14 | 0.3 |
| 1337330 | 106 | 78 | 33 | 24 | 1.0 |
| 1337408 | 86 | 55 | 20 | 18 | 0.5 |
| 1337564 | 61 | 48 | 32 | 18 | 0.2 |
| 1337635 | 51 | 28 | 7 | 13 | <0.1 |
| 1337932 | 53 | 40 | 23 | 11 | 0.1 |
| 1338428 | 110 | 83 | 51 | 39 | 2.0 |
| 1338599 | 92 | 73 | 35 | 22 | 0.8 |
| 1338694 | 85 | 51 | 26 | 20 | 0.5 |
| 1338704 | 103 | 53 | 25 | 8 | 0.5 |
| 1338824 | 94 | 47 | 24 | 9 | 0.4 |
| 1339192 | 69 | 51 | 58 | 19 | 0.6 |
| 1339291 | 69 | 43 | 24 | 25 | 0.3 |
| 1339376 | 86 | 90 | 51 | 21 | 1.3 |
| 1339386 | 96 | 43 | 25 | 7 | 0.4 |
| 1339412 | 80 | 50 | 35 | 13 | 0.4 |
| 1339504 | 79 | 66 | 57 | 25 | 1.1 |
| 1339661 | 63 | 22 | 26 | 29 | <0.1 |

The application's sequence listing, which the Patent Office published only in electronic form, follows.

SEQUENCE LISTING (2939 sequences)

SEQ ID NO: 1 - DNA, 4782 bp, Homo sapiens
agggcaacgcgagggaagaaggtggcggctcccactcgcttctccctcgggtcgggtccgagctgccaggccgcatgccactccctgacggggcgcggaccccggggggcgtctgccgggaggcgcgcggcgggggctacaccaaccggaccttcgagtttgacgacggccaatgcgcccccaggcggccctgcgcgggggacggcgcgctcctggacaccgccggcttcaagatgagcgacctggactccgaggtgctgcccttgccgccgcgctaccgcttccgggacctgctgctgggcgacccgtccttccagaacgacgacagggtccaggtggagttctacgtcaacgagaacaccttcaaggagcggctcaagctgttcttcatcaaaaaccaaagatcgagcctgaggatccggctgttcaacttctccctgaagctgctcacctgcctgctctacattgtgcgcgtcctgctcgatgacccggccctgggcatcggatgctggggctgcccaaagcagaactactccttcaatgactcgtcctccgagatcaactgggctcctattctgtgggtggagagaaagatgacactgtgggcgatccaggtcatcgtggccataataagcttcctggagacgatgcttctcatctacctcagctacaaaggcaacatctgggagcagatcttccgcgtgtccttcgtcctggagatgatcaacactctgcccttcatcatcacgatcttctggccgccgctgcggaacctgttcatccccgtctttctgaactgctggctggccaagcacgcgctggaaaacatgattaatgacttccaccgtgccatcctgcggacacagtcagccatgttcaaccaggtcctcatcctcttctgcaccctgctgtgcctcgttttcacggggacctgcggcatccagcacctggagcgggcgggcgagaacctgtccctcctgacctccttctacttctgcatcgtcaccttctccaccgtgggctacggtgacgtcacgcccaagatctggccatcgcagctgctggtggtcatcatgatctgcgtggccctcgtggtgctcccactgcagttcgaggagctcgtctacctctggatggagcggcagaagtcagggggcaactacagccgccaccgtgcgcagacggagaagcacgtggtcctgtgtgtcagctccctcaagatcgaccttctcatggacttcctgaacgagttctacgcccacccccggctccaggactattacgtggtcatcctgtgccccacggagatggatgtccaggtgcgcagagtcctgcagatccctctgtggtcccagcgggtcatctacctccagggctctgcactcaaagaccaggacctcatgcgagccaagatggacaatggggaggcctgcttcatcctcagcagcaggaacgaggtggaccgcacggctgcagaccaccagaccatcctgcgcgcctgggccgtgaaggacttcgcccccaactgccccctctacgtccagatcctcaaacctgaaaacaagtttcacgtcaagtttgctgaccacgtggtgtgtgaggaggagtgcaagtacgccatgctggcgctgaactgcatctgcccggcgacctccaccctcatcaccctgctggtgcacacgtcccgcggccaggagggacaggagtctccggagcagtggcagcgcatgtatgggcgctgctccggcaacgaggtgtaccacatccgcatgggtgacagcaagttcttccgcgagtacgagggcaagagcttcacctacgcggccttccacgcccacaagaagtatggcgtgtgcctcatcgggctgaagcgggaggacaacaagagcatcctgctgaacccggggccccggcacatcctggccgcctctgacacctgcttctacatcaacatcaccaaggaggagaactcggccttcatcttcaagcaggaggagaagcggaagaagagggccttctcggggcaggggctgcacgagggtccggcccgcctgcccgtgcacagcatcatcgcctccatggggacagtggccatggacctgcagggcacagagcaccggcctacgcagagcggcggtgggggcgggggcagcaagctggcactgcccacggagaacggctcgggcagccggcggcccagcatcgcgcccgtcctggaactggccgacagctcagccctgctgccctgcgacctgctgagcgaccagtcggaggatgaggtgacgccgtcggacgacgaggggctctccgtggtagagtatgtgaagggctaccctcccaactcgccctacatcggcagctccccaaccctgtgccacctcctgcctgtgaaagcccccttctgctgcctgcggctggacaagggctgcaagcacaacagctatgaagacgccaaggcctacgggttcaagaacaagctgatcatcgtctcggcagagacggccggcaatgggctgtacaacttcatcgtgccactgcgggcctactacagatcccgcaaggagctgaaccccatcgtgctgctgctggacaacaagcccgaccaccacttcctggaagccatctgctgcttccccatggtctactacatggagggctctgtggacaacctggacagcctgctgcagtgtggcatcatctatgcggacaacctggtggtggtggacaaggagagcaccatgagcgccgaggaggactacatggcggacgccaagaccatcgtcaacgtgcagaccatgttccggctcttccccagcctcagcatcaccacggagctcacccacccttccaacatgcgcttcatgcagttccgcgccaaggacagctactctctggctctttccaaactagaaaagagggagcgagagaatggctccaacctggccttcatgttccgcctgccgttcgccgccggccgcgtcttcagcatcagcatgttggacacactgctctaccagtccttcgtgaaggactacatgatcaccatcacccggctgctgctgggcctggacaccacgccgggctcggggtacctctgtgccatgaaaatcaccgagggcgacctgtggatccgcacgtacggccgcctcttccagaagctctgctcctccagcgccgagatccccattggcatctaccggacagagagccacgtcttctccacctcggagccccacgacctcagagcccagtcccagatctcggtgaacgtggaggactgtgaggacacacgggaagtgaaggggccctggggctcccgcgctggcaccggaggcagctcccagggccgccacacgggcggcggtgaccccgcagagcacccactgctacggcgcaagagcctgcagtgggcccggaggctgagccgcaaggcgcccaagcaggcaggccgggcggcggccgcggagtggatcagccagcagcgcctcagcctgtaccggcgctctgagcgccaggagctctccgagctggtgaagaaccgcatgaagcacctggggctgcccaccaccggctacgacgagatgaacgaccaccagaacaccctctcctacgtcctcatcaaccctccgcccgacacgaggctggagcccagtgacattgtctatctcatccgctccgaccccctggctcacgtggccagcagctcccagagccggaagagcagctgcagccacaagctgtcgtcctgcaaccccgagactcgcgacgagacacagctctgagccagccctgcacggagctcaggccaccaagcccggggtcctcaggaaggacgtggaggagcgtgtgaggacacggtggcactagcgtgaccctggggatggcacactctactcaccatggctcctgggactccaccctggaaaggagcccctcatgcggggggagggccagctcacccctgggcacctgcaggctagtgaggagagttttttaacctatttttacacgtcgatgcagtccacttctctttacacagatgtaccgcaactcgtgaccagggctggctgggagggcaacgcagggactggacgccctacagggccgagcccaggctgtgctggagggtggggctggggtgcatggggaggggagcagaacccagaacccaggagccccgcgtgggccacacccaactcagagccggcctgagcgttcacggccaggcagcctcgcttccttgcagccaagggctgggggccagggctgctgttctgcactctggggtgggtgagggggaccctgggctgtttgctgtcccaagccccttctggaagttagaagcagcaaagggcccggggaagccgggcatgtgagaggggtgcgtccccaggtcccccagagggccctgtcgccgaggacctttctgaaggaagcagaagacgccatttcctctacttcacactgaactgtcccagccactgcatctagggggcattgggcggaagatggtgcatttccatggaccattttacacttaccttttaaagcaaagcctcattttctaaacccctgacttgtgaagcacaattcagcctccgggctgggccacgtggagagagaggatcttctcagcaaggcgagatcccgggcggcggctgacatcaggagcgccaccctgcgtcctttgctgctggttccttactggtttgtacggtcagcgctggaaacttctattaaatggatgcattctggaggcatgaagttaaaaaaaaaaaaaaa

SEQ ID NO: 2 - DNA, 98000 bp, Homo sapiens
tctagggggtgctcagccagggaggatcaggagaccccaactctcccccaaattggcacggagcatctcggcaacccatcaatgaacaggactcaggggcacaggagggctggaaaggaaggcttgctcctttccaggaacagaataacaacaggtaaggcttgaacaaatcaggaagtgccctgccgaaaacgtggcctgctctagccgtggagacccagagggctgaaggagacggggatgacaggggacacactgcctgcaaggtggtgagatgtcccatcaccgtgatgccggaggactgacggcgtctacccttacaactcacagcgtgctgctcctgactgggccccagggcgctggcaagccgcaggaactgcacagacatctccaggaccgaggccatgtcctcccgccggccatcgaactggggcagcagggcccgcagacgctcacagctcaacgacatccgcttcctggttccggtcaagaaacaaatacctctgggccctcctgccctccccgagaagggacagcaactgctagaacctgccagatagaccctgggcgcttgtcaggcagagggggctacaagatgactcagagctgcccccgtggtctgaagccccgagatccacatcagagcacagcctgggcctgacccctggacctcggcgacaggctgtccagcccaggcccaaaccatggctgctttgcggtgtggaaaagacagcgagggtcagaggcagtcagaagcacagagggtcacaggtgcacagcctcaagaggccaaggcttcaggataaagaggggctgcaggatgttccccaacagggcttttctggtttacttggagatgtgcagtctgtccttctcctgggcacaggccacgagcccctcccagctgcctgacacctggtggcagccccgaacataatctcacccgctccacccctttacagcgccctcacccctgggaggcaccaccactcacctgcgctccctctcgctgatcacgttccgccgaaggcaggagctgggaccctcggccaccgtaggggccttgggcgggcccgagccccgggccgagtcctcgcagcaggagagggcaccagacagggagccgctgccgagaaagccaagagcaccgggccctgagaaccccagaaaaggccaccaggagtcccagatgccagaatgggcgtctttggggtgcgggtggaagccaagactgggtcacgtagggacacggcccggccctctctgcaccccttcccctctcccagggtccagggctccgccccaggaggcccaggatgggtggagcccagcaacttgcggaagaacccctgggtacaggccttgggcccccaaccccttggccgccagcccaattcctcacttgcatcccctgacggtagggattctggagacctccgggtagggctcggagcaccgggacgccatgaactcgcagctgcggagcgaccccacgcgcacggccccttccgcaggcagccccgccccctcacgtgtgctctgcccacctgccacgtgctttccacctagcccaccccacccccacttgcaatccgcccccatagcgcatgcgctctagccctccccacgcagccagcccggggcccacgtgacccgcgttcctgcaaagaaggtgctggaaagggactcggggggtccacccactctatgcccccgcaggacgccaggggaaggggccccagcccaggtggccctgcctctacccttaccttcccgggggtcgcctcggttcccacttatgcggtggtctcggtgcccttgggcactttggagatgcgggctctgcccttaggagcccagcccctggtgggagtgggcgggctgggctgagttgtttagcccaggcctgggggacccagggacacagggagggggaagggtacccgcctgctccccagtcgcccacgcctccattttcccccaaatctagtacgcttgcagacgctgcgcctcagggtagggtcaccatccacacttctgggtcgcccagaaccaggggcatcttgtccccaccccaggccaccatcgtccgtgctcttcctcccgctgagctctgccgggcaccctcggaaccgtctgtcccttcacctggccctgcccaagcaccatccccgctttatgccctggggccccagctcgacccctcacctcacactctcaacaggtttctgcgggatcgcgggggtcctgcccatccaaattcagaaagctccggcgccaggtgtttgctcacctccccgctgaactccaggagccgccctgcgctgggcttgagtcccccagtacatacttttggggggatgacggagggaagggggaggtggagacccttcctctttcacggaggttgcggggggccctcagggaagcagaggggacgagggtggggggtgaggctggactgttgggaggacatccctggcctggctcgtgctgaggtcgtagcgggaggaggtggggtgggtggcaggggctctcctcccgagaggggaggcaagaaggagcccgggcaggtgccaccacacggggacgtctgtccggggtgccccagtctcctgtggagaaggcgcggctctgggcctcgggctggcatcctggactttgggccaaagatgggtgaagggtgtttggagcagagggaggttatgtaatataaggtggtgtctccatccctgctccgcccagccttggctgcaggtcagacatggaggaggacggggttggagaggagggcaaaagctctcggggacctgggcccctctcccggccctgcccctggccagggagggatggacgggctggcgatctggggctcctcagtggcagagtggggccaagtttttgtttccctaaagccctcggaatgtcatcaaacctgtgactctcctgccgttgacaacacgtgtaattactgctaattaatcacagatgcagatggtgcggcctctcagttttttctgagttccccaggcaggagggcgttggcagaaaggccaccatcttgccccggcggcacccgcccaggggtggtgggaccccggcagcagcaccggccaatctagggacctgaggaaaaacccccaagatgcccacgagctgtgtggcgggggcacaggctgaacctctgctggggacttagcatcctagacttccccgagtgttccccacccacccctcaaaagcatctgtgttcagcctgctgcctcctggagaaacagggaaggaccctctggagagacactggggaggccagggaccacaaagtacatggcatgcgccctccaaatggacctggccctccccctggccctcgtgggcacagtcctggcttagtgaggggcctggtccaccctgcaaaccaacaaagctctggggacagaaatcgcagttctccagagctctgtgtgaggctgagccagggtgacgcatgtgtaacagtgtgagcacgtgcacgggaaagggggcccgcagggggaccctctgcttcctagtctttggcctgcagcatcttaagttggggcccctccccacccgtctaaaggtgctgtgtgtgcccgtctgggtgagagcacagggcggggtgcagtcatccccctcccccaggccaagcccaggatgtggcgcccacccacagatgccgcagcctgcggggggtgtgggggcgggggggcggggagtcgtcttgaatctggcttgtgttcaatgaccagtgttgaccacggcagagcagcacaagcgggaggtgctgacggtccctgggcgcagcggctggacgctggcggtccgagcagcgcatgtgccctgctgcccgccaaggacccagagccccctgagcccccgcccaccacggagccctcccaggggtgtagggcccggtggcggcgcgcttgggcttttctagccattgacgaaccccgtcctgtttttcggagttttgagggctcagagggccgcggcgggagcggatcgccctccctaccccgcacccccgtcccagcctgggccagagccgccgcgggtcccggcgcggccggcagggggcgcgcgcggacagacgcctgcacccgaccctggaactggcgtcttttcctcgctaatctgcgaggaaaaaaaaaatgtttttcagggcaacgcgagggaagaaggtggcggctcccactcgcttctccctcgggtcgggtccgagctgccaggccgcatgccactccctgacggggcgcggaccccggggggcgtctgccgggaggcgcgcggcgggggctacaccaaccggaccttcgagtttgacgacggccaatgcgcccccaggtacagtctgctgcgccctccccacgcggggaggccccggtctaacctaagacccccaagttccccctcaggctcccgcaccctccaggacccgccattcccagggccatccaacttccccaggacccgcgagtgccctcccaaccaccttggggaacaggggcgcccctcagggtgggccgcactaatcagcaggtgccgaggcagcagcgtccgtccccatctgtcctcgacctggtaagaagctggggggagcggccgtggctacatgggggtcctgagcatctcccaggtgtggggagtggcagggaggctgggggcggtgcagggccttccatctcccccagcccctgccccaccccagcttggggaggaaggttccatccttcttgtgtggcatggcagtgctcggccagggtggggtgcccggcgaggttaccccacacagtagggggtttccagagcaaccttccaaggaagagtccccagtgggaagtgggctaagtggctgtcagatgagggcgggagtcctgggttctggtcactcctcgttccccgctggcctatccctgggaggagagggccagttgagaatggcattcaggtgacctggagctagctgttccctgtgcagtgtcctgggatgccatgcgtctgccgtccacccagtgaccagtgcagaggcacggaccggcagctgagtgggacagtcctgagcggaggttgccccagggtccaggttccccatcctctcccccatccctcagctcttgaaaacaggcaagtctgcccctcaccctgtccccagagccagactccagggaaccctgggcagagccggtcactgccttgggcgaacccctccccaccaggacagagccctttcttctggatcctgcccagtctcaggctgtcctgaggccagagaagggggtggaagagcatacctgagagcgggaggcctggtgcggctgcctgtttgttctatgggactcagtttccccgagtgtaaaatgaggaggtagggcggatggtctttaagggctgcctctggtgagggaccaggctggagaggaggttcccagaatcaagaggcaggcacagcacccacctggcacccgggggagtccggggtacagcgtgtgtgaggagcaggtgctctgagggtggacagtgacttggtgatgtccttgggaagtgggcacagcctggacgtgctctgagggactatccgggggatgcctgtcaggcacagagaaaatgaccccaagggggtcctggattgccctcatctttgtgggctggccggcccctaccatctccctccccagcctagcgttgccctccctggccattctgctggagtttatcacctaccctgctgggcctgacctgctccagacgagccggcaggacagtgtcctcagggtccagcctttagctccaggcctcatcctccgggtccttccagacacctgtctctcccaattggccctgcccaccggcccgggacagctcctcctccccgctggactgagctggcctccgttgcaacagagattccctgtcacactgcaggcagagcagccgccggcagtggagggatgtcaggcgtcaggcttggggagggagcaggacctgggcttggctgggctcgggagcggggagctgagctccaggtgaggccaaggcttgcggcccaggcaggtggcttcagctgcagaaagaagaaccttcgtgctgcctggtggtggggggagctctgtggggcgggtttccccaccagctctcacatggggaggagggtgccaggcaacagcgtggtcagaacccaggccctggagtccataggtcttggtgccaggccttgagcaggcctctgtctttcctgggtgctggaggatgccagccttggtgctatggttcagaggggccaggaggtgcttggacaccccaccccactccagtgccccagctcaaacccccagctccacgctagtggtgtccctgagtcagcctcaaggccatcaggccggaaagtggggctccagagaggagctcctggccttccagtttgcaggggtcttcacgggcctctggcctccaggctccctgctcccacctccatgccatggagtcccaggccctcagctgcctccccacaggccctggagatgacagctgttgtaggacagggagggaccagtggccctggtggccccagagctggcaagtgcccaccccctgcccagcgcacttcgcatcagagcccctgccaggcctttcctggaaataccacttcccagcagctgtgctccagggcgggcctgggaccctctaggccctgatgggatcaggccctggcatcctgccagggtacatgcctggcccaaggtcctggccagccctccaggcccatattagggagcagtgccttcagcagcaggaagtagctcagggctcatgggaaaggtttgagggcccaagataccgcccagcactggccggcaggagggacggctcaggccacagggaactcaggggtctgctgtggcccaggagtggccacagtaacagctcaggaggacagaggtgagtgagaagggagcagacagggtccccacgagggcctctgcttctgttccagtggctggcctgggtgtggcctgtgtcctcgcacccggcagcctccaagtgtgctggtctggttcacccaccgtatggggagctcttgattaacacagaaaattacttgggacgagcctggtgtggcagtagtggggccttgctgtggggccatctcatgccctcggagggtgttggggggcatctcgggctctcccctgaggctttttgtcctgcttccccgggatgcaaacttgcaggctttgacccaggtgccatcggccctggaaagggtggcacttctgtgtctcccacaaacaatcccaggtttctctgcaacaggaaagtttgtccaagtgtgtcccagccctgcatgggtgagggatgctgaacgggtatcgtgtacccaaaaacaagtgctgtgtgtgcatgtgaacctgggcgctccgtgagccaggcaggcgcaccgtgggcacgtgtgtgagagctggaggaggatgtgtggggcccgccagccagcttgtgtgaccttgaagtcaccggtcatgagtctggggaaaggcaggctgggctcagcgtgcccgtgctaggtggctgggtgccaaggcccggttaaatgggcatctttcaaaggtgtcttgggacctctcccagctgtgtgtgtggataaggccacccatgttcacccagacccactttcacctgtggaacttggaagtgagccagcggggctggaactgaggccaggatgcgattggcccagggaggtgagaccagtactagcagctggcaagtgtaacaggtttgcaggggacagtggcagggcagaggccgcgagcttcctggggtaggtccctgggaaggccctccttgagagggggcctccagctgctccctagatcgggggcgggaggtgggggaggtgggagaggagggtggcctcactggagcagaggtgggggcatcaggagatggagggcattgcaggaccagggtctggactggcacaaggcgggcgccccgggaggagcagagggcctggaggagcttctgggaactgtgtctgtgaggttggtccatcccagcactgagatgcagtagctgtgtcagctctggcgagtcacttcacctctctgggcctcagtttcctcatctgtagaatgggagtgctagcatggaccttacgaggttgtgttgagcccatgctgacagcacatacttggtgtttacaaagctgtgttggcgtcgggagcttgcacaccagccagttcgtctttgccttgtcacgcaccagcctgtgttgacacgtcagagctaagcatttgtccggtgacttcccaagatggattcttaaaagtggaattgcccagtcaaaagattcccacagtgttaatgtttgccgcatggcccacggcccccaggggtgagaatggctcctcctcacaacagtgccggggtgtggtgtgtgccagctgccaccgtctcctccttggcaccgtcgccctggggcacctgtgtcctgccaggcaccactcaggcctcggaggctgagacacagctggccccttggtgcccaggaaaggcacacaggcctcctcctttgtagccactctggggcactccacaagaggggcaaagagggcttccatctgcctgtgactccctccaggggccagaagtgggtcctcatgcttcacaggcaccaatagtgcttttgcctggggcagaccccagctgtgacagacagccagggctcagaccaccacacccagcagctttccagtagattttcctgaccccagccacattgagggagggggctggggcaggtattgggagcgccagtgagttggtcattttctgagcatgatggcagctcagggtacgggcccctagatggagcaggggccctgtgcctcagcctccctaaagtggcccagccctcccagagttcattggtgctgaggaaatgaagcctcacttgtgcctcagttcccagacaggcccaaggccaggcacggtgggtcatgcctgtgatctcggtgcttttggaggctaaggcgggaggattgtttgaggccaggagttggagaccaacttaagcaacatagcaagacccctgtctctacaaaaaaaaaaaaaattaaaaattaagatcagataaggcccggtgcacccctgcaggccatgccagccctcaggtgctcagcatggccagcccagggacctggcacagttctctgggggaatgagcaggggcatggtggtgcctcccatagctgtgggagaggggcggcttctcctccaggtgcagcccccaccacggcctccccaccctcaggctgtccaccctaggagggctgtccccaagggtcccctgccggctccaggctgtgctccttgctatgatcaccattgcccccagcagccagctcagctcgagggtactgacagctgacgtgtgcagtcactaagcatctcccagcagccacagcgtggccgggggcaggggctgtgggccgatgcagctggagaacagggtgtggcctgtgagaaggaccagccaagggtcctgggcacccagggcccaggaccctgagatggacttgccatctgaccctgagtgaccagcacactgctgcctgctgcagggggtggggacagcagaagggctcgcctggcgtctggcccaagcccaggcttctgcctcccccgacaaccttgggcacgggtccaggggtgatggcccccacagcctcgcctggggcccctgtgtccactgtgctgctggccttcccctcttcccgccgggctgggagaaagctgctctgaagtctgtctggataaatctacagcttgatttcggctcctccatgtgttctgagctttcactttggatcctaaagcatctcaggagatggtgctgagcagccaccctcgcatgggcaagaagcccctcccctaaagagagacgtcaccgaggacgcttgcctgcccagctgcctgggcatctcgagcagctctgactttttaatcatcgtgcaaaggaagcgttgagttttctgccatggtcagcagagaggttctgcagctttgcacttgctggacactaagcccagcactcagacacccccaccacagtgatgctatgcctgcctgggggactctcctggatgcagggtagggatgcccacacacatacaggcacatgcacacagatccatgtgcatgcacacatatgtccacatgtgcacatgtatacatatgcccatgtacatgtatgcatacatgcacattgtacatacatgcatgcaatcccatccacacatgcatgcacatattcgtacacatgcctctgcatgcaaatacatgctcatttacacacacatcagcatgcatgtgcgtatttacgtgcttacatgtgctcatctccctcctccctaacttctctgtcaaacatggctcgcccagctcctggaaattttgaactgagtgtgaacaagaatgtattttaggagagaaacctcattcccttagccaaagacagtcacaatctttttttgttgttgttgtttcagacagaatctagctctgtcacccaggctggagtgcagtggcgcagtcatggctcaccgcagcctcaacctcatgggcttaaatgatcctcccacttcagcctcctgagtagctggaactacaggcaccatgcctggataacttttgttattttttgtagaggaaggtttttgccatgttgcccaggctggtcaggaactcctgggctcaagtgatctgcctacctcgggctcccagaatgctggaattacaggcgtgaggcaccatgctggaccacaagcaatgttaagagaagtctttgcgggaaaggacattttatccaggacttcctatgctgatcctgagaggcaggctccttgcttctttctgagccccacccggggcagaaataagggcctggtgatgctggagtttagggaaggacatctttagcccttagctgttccgtttgccataacacacatcgtgcatgatgtattcactttgcaaagcacaatgggtgagacgctgccctagaaccccaccctgcccccagcactgtggctgccagtgtgtggggacagtctctatatcacctacaagctgggtgcccagagaaacccacctcttctttagggttctgtggaaagcggtcgtgtttagtttttaaatggggttcattatatgccattctgtttgtgtagtgatgcatccacacgggctcacgcaggctcacagagacctgtgccttcacagagcagtcttggctgtagctgtcagtcgctcctcagttcagggacgtgcaggctgttttcagtgttcaccttcacacatgaggccgtgatgaaaatccatgcctgggcctcctcggccacagatcaaaaatgtccccaggtagaggttccaagttggagaggacccacgattccatcataattaatccactgctcccagtcggctggacactacatgagagccctggcttgcagaaccccccgttctgtaaccacagccgatcactggcgcaggagaccgtccaactctgcatctctctaattattagctaggtggcttgtctttacttgtgcgttgttttccattcctcttctttgaacctcactcatccatcctttgagtcgttttcttttttgagatggagtctcgctctgtcacccaggctggagtgcagtggtgcgatctcagctcactgcaacctccgcctcctgggttccaacaattctcctgcctcagcctcccgagtagctgggattataggtgtgtgccaccacaaccagctaatttttgtatttttagtagagatggggtttcaccatgttagccaggctggtctcaaactcctgacctcaggtgatccacccaccttggcctcccaaagtgctgggatgacaggcttgagccactgcacccggccatgttttctgccagattgttttcctttccacgggacctgtaggcaccaggctgtgttctgatgattattctgttgcaaatatgttcttcctgttggtcgcttattctttccttttgccagtgatgtcttttgttaaacagcagtgttttgttcagatgtagaagcttttataaatctattcctcttggaatagatgatttttgggtttcgtgtattaaataaaaggccttctcagctctgaacacttttccctgtattttctttccatcttgtccttggtttggggctgcagatggggtctaatcttattttatccaacagaagacactgcatagcataggctggagccaggtactgggttcaagcaccggccctcccaaggcaaggggacaagtgataaacaaggacaaataaggaacaaggtcaagtgcatttctgaagttctccggcctccatttctccatcaacacaatgggaaggatgtcgcccctcctgatatttgcaaccgtgacttgagtcaggacaggtggagctgcactcgttccaataccataggacgaggagtgccccccgcctcctttctcaagcctggattccaacgtgggcttcagctggtcaaggcactctgctgtgtctccccactctctgtcttttcttgggccagaccgcagagtgtcagctgctgtggctggacattggtgctggcagcagaagacgagggccctctctgttccttttcacaactgctgtggctgttcttgcacgtatagtcttcaggattaatttttgaaacagttcatcaaattctgagaaaatagtgatgcgctcttgattggcggcgattccctttacccgtgtgtttggagaagggactgttagaccctcaggaagaagacctccgtcttccgccagcgacagcttccagtccatctctcaggaacgctgtgcgcccctgtgggtttggggctcccgcgcctgctgtgagcagggctttctcccggtggctctctgctcctgctctccatggtgctcctgggttggccgccatactaggttccgtatttgctctagtaggttttcagttgattcctcttgggttttccagtaagcaatcatgccaactccaaacagagcccccttcatgactccttgcttttatcctttttctcgcagcagtgcacagatgaggcctcctttatgatggcaagggcagcctcacattcccaactggaacgggaatgcccagagcctttggcgggagaagcttgtctttaagcactttgtcagacagccctggctccatggccaccgggaacagatgcagggggagtgagaagcaggcactcctggctatcagaagagccccccagctggccaaaggcagcacagcccaaggtgaacctggacctggcccccaccccagtgcctctgccgggacctcagtgacgctccttgggctctgggagccacttgtccttgccaggaactagggatggagactggcttctgagaactgttctcaggattccatgccaccacctggcttgccagggtgcctggcgtgcagctggctctcagtccatggcagctggcactgagcacagctgccgggctcccctctgatggggttgtcagggtcagtgcacgtgactacgtgtgcaccaaacagctgacggggacttcctgttgccgtgcccaggtgtggactgcctcgctcattcttggcctctccagatggattccaaaagtcagtgtcccaagcctgagctctctgatgggcctcagctgagcggagggggcacgctgggcgccggccaccctgggtcatagcctttgtccataagagctcagccaaactgctggccacgctacacctgctgtagctgaagcactcacctgcaggccctgttccgcgtgcctcaggcatgctgtctggttacatcttcacactcttcctataagggaacaggcatcagtatctcccttcacgcatgagcatacaggctcagggaggtgaagtgactcgccgggggccgcccagcaggactgatgggccaggactgaactcatgccagcgggactcttgccactctctgggcctgcagggtgtgtgctgacagcccagagagtccccaagaggagcagcggggtgctctgagcccctgggctgccccggccttgtctagggggtgtgctgtgtcccgtcacctcagccctggctccaaggggtgtgtgagtcccacaggttgagctccacaccttgtccagagagtagtgtaagggctgaggagagggacaccttccttaagccaccaaacacagaattcttatggaaattggtaattatttggcacagcagtcactcagaaaataaaaagatcatggatgtggccttgggggtcctagatttcctccagggccccttgggtcacacagggaggacagcgcaagagaagagggggtgcagaattcgaggtgggccccagggtccccgtgtctggctatgccagggttatgttccagttccacctgaaccagcttcaacagggaccagaccccccaacactcccctctccccctgtgcccaaaaaagctggccgatgtaggccttcctgcttgcgaaaagtctcaaccagaccccgaggacacggggagcagctgttttgctgctgtcctcctgcgatgggcccctttcccagagaccctgtagccccggccctcagtcccagccctcagccaacacaacagccaaggattttagccccggccctcagccaacacaacagcgaagtattttcaaggtttctggctctgtggggggaacaaggcaggatgccaggaggcctgcaggacacctgcttatggccgtgtgctcgctcaagtgtcaaagcagcttcccaagggaagaagggcatcttgtccttgtcaccctccccaggccacatctggggagcaggggtggggccaggtctctggactcctggtgcacttccttcccctggtgactcctgaagcaagccaaggtccaagcccctgagcttgtccatgggccctgccaagactgggccttgaggccaggaggaggaaccagagccgctcaaaaggcagacggggtggggacgggaggaggcagccacgcctgaggagccggcagtctcttggggttttgccattgaaaggggctttcagtgaggaaggcacaaaatcaagaaaatagagccccgacccctggccacgtggttcccctgcctgcctgcacctccccatggcccagccagcttgtgactaaggaaaaacatgcagctacgctgatgcagttaggaaaatgttattttttaaatgctgccagatcctgggggttgaacctgtgacctcagaacaaggagcagggtttggggcacgcacctgctgcctgcagcttcagcctggggtgcccatagctccttgcctgctgcttgtctgagggttaggggacacaggagaggcacttggtgggggctcaaggaatgtgcccacccctcccgacttgaggagagagaggagagttttgtagcatccctggacctggtgttccaaatgagtggcctctgtgcagggcctacgggcacagcacggggagctgggtatggtcagagcctcctgcccctgcccgtgggggagccagccccctccatcccccctctgctctcctgctggcctcgaagccttgaacaagggccggcctgggccaggtaaggagctccctgcccctcagctcctgcttctcctggagcagccaaaactcacttcagtgggggacatggggacaggaaagatgcaagacccctggaagacacctgcttgggcccccaagaactgcagaccaccaggggtcctcccactctacctggtgtgccacgatgcccctaacctgcgctgccagctctctgtgtccctttgatccctcacctggtgacagtggcagggcagctcagggcccagagggcctggcagccccccggggttctgacctgagctgagctgctccgcctggggaggctgcaaacaagggtgtcttcttaggcctcctggtcactccaccctcacccctcaacagcctgagggtctgagacgggggtctctggggctggaccctgaaggaagattgagcagccggcctcggcaaagaccctggggacggggaggggagctggggagttgggaggggttgcaggggtgtggcggggcttcagagcagggggagggcctccatcctggctcttgggggatcagggaggagtggtgcgcgcctgtccctgagctggccatgacagctcccgtcccccttacctcctgccaggccccggggccgctttggagggagccccgccccctgcccctgcgcagcccccgccctagccccagcccggcgcagccggtcccgcgcgcccccgcccgcatgtgccgccaggcccgcccccgcccggccgcccgcccgcccggtgggtcgcggtggccgcgggctgcgctgcgcgggccgggcctggcgggccgggggctgcgcgcgtccgcgagggcgcccgacgcgggctgaggggcgctggcgtgtgcccgcaggcggccctgcgcgggggacggcgcgctcctggacaccgccggcttcaagatgagcgacctggactccgaggtgctgcccttgccgccgcgctaccgcttccgggacctgctgctgggcgacccgtccttccagaacgacgacaggtagggaccgggcgcggggtgggggctggggtcgccgtcccggcgccgccgcacgcccggagctgtccgcggtgctgacggccggtcccgcgcgcccccgcagccgccggcgcccttcaacttttcccggcttctggggacgcagaagtttcggagggggtgcgggcagggggaagcatcttctcgggagggggtctccggaggagggcgcgggatgctcggagctgcggagtcttccagagcccgacttggggcgcggaggcggagggcggcctggccttccggtgtctgctcccaacccccagcaccccagtttttctggttttgggggcaagccagggccggaagcgccccggtggcggagcccgcagcctggctgagggctggcgtcctccaggctcaggcagcggtccttgattaattattcaatgagggagcttgtccttcaggttcgtgacctggtcacttattccgagtcaccgtgtccccgtcccctcaacatctcctgggctaaaaaggcaaaatgaattgtgtctttcagttaaggaccaacaggatgagcccatgggaataattcatccgctgagggggctggcaggaagctggaagaaatgttgcttttctctcctccttttccccaaatagctgtcttgggtaaacacccagcactttagctctgccaggctctggggaggcgcttttttgcctgcaagtgaaggcaagtgctctgaggactcacgcggagctggagcccgcgggggcttcaggtcaggaaccgctcctcttccagcgtgtagggtacggcagggtcggggttgtcactgtctccagggctccgtcaccacccagccctgggctcagctagcaaatccgcactttcccccaacaacgcagttattccggttagcacacaaagtacacgaggttgaaaatggtcaggacacaaacagctttcagaataatctactgctgaaaccgcagctgaaaaagaaatcatgtttgtaactagagtcagtcctagggactgtatccatgaggaccatgaagatttgtaaaaagggggtcttaaaacccctctgcctgcggggaatggaatattctaccagacctcccataacatttggttgtgtgaaccaagagtcaggagtggggactgagcccagtcttcatccactcagaatcagggagtgagcgtcctgcagagaggccttttaaacttggtttttcatcttgttgaactcagtgctctaataatgagcccacctaagtgcaaatgcccaggtgaagagtttagtttatctccctgtgtgggcagagggcagtcagccaggctggtcccagggcggcgtgcgtggctgggaggctctcctgggagccacacaaagcttccctaggccgaatccgtggactcaacatctttctaagccagcaccagcccctcagatgcctgttcagctgggacttggttaattcttgaaaacggcagccctgggagatccttccgatattgggcaggaagtggtgtccatccgcctaatggtgcctggggctcccagatgactcgataacgcctgtggctgtggttgatcaaattgtaatgctgtattcctgagtgttcaggagtggacagcagaggcttttgctgtccgcctagagagaaccatgcccatccctgggagaggagaagctggcatgggatttcacaatgagtccctgatcctgggtgtggttttttaaaattgtggtaaaatacataaaacagaatttaccgttagtgacatttagtacacaacactgtgccaccctcaccactgtaattcgagaacatttgtataccctagaaggaatctccttaaccactgggactcactccccaatgcccccttatcccccagcccctggcagctaccgatttgcattctagcggtcttggcgtgctgtgcccactgggcacatgggttgtgtgccgatggtattaggaggtggaccgctggacgtgtgtggctgtgtgtgctagctagtgcgtggctgtgggtcctctccaggaaaggcccatggggtacagggcatctgtgccacccccacaagtgccctgctctctctggttggaaatgaagtatacagtgaggttctattggagggagagtggccagggattagagcttcggggctgtgtggtcgccatacctgtcctgtggcgctgtccctcaagatggcctcagagatgctgtgctgcataccttttctcatgtgtgaaggatgggagtggacctggccctgtggtggtggtgtgcataggacgggaggggacctggcccctgtggtgttggtgtctataggacaggaggggacctggcccctgtggtattggtgtctataggacgggagggaggggacctggccctgtggtgttggtgtgtataggacaggagggaggggacctggccctgtggtgttggtgtgtataggatgggagggaggggacctggccccagtggtgttggtgtctataggatgagagggaaggggacctggctcttgtggtgttggtgtctataggatgagagggaaggggacctggctcctgtggtgttggtgtctataggatgggacagggaggggacttagcttccctctgagagtggttccccacttctcacctctgagaggaagcttgggcctggtggagatggtggccttgggcaccccgagatctggaaggtggggggctgctggtcggctggtgtccagcccggttcccagcagctttgcctggctccccctggaggctgcgggggctggtgaggctggctgggcacagtacaggagtgggcaactttccgggggcgcaggggcaagtgagttgggggcttctgcccaagtcacctgccagctcgccagccgctgcccggcacagctgaacccgctcctcacgtggactcaggccctcctgagaaattgcctcgactggatgtaagagagggtgccctagaggcctaggagcccggggaacccccacttaccccacccaggaatggcagctccttggtctcagcagcagcctgggggcctctcctcttgaaggcagctcagggagcctggcctgaagggtttctcttcctcaaaccttctttgcccaaaggggcttgcttcagcctccatggtagggttgggtgagtctggcatggcctctctcatgaccccgatgctggaatgggtgggcaacaatgagggaaatcaggatgctgacaggggtcctgaggtcacccaagccctcccctatccataaggacacgcacgtggggaccccagccctggctctgtggaaaccccaagctgacctggaggaggggatcagccgcttggaggaccctcctgggtgcttggggtggggtctgatgcctctatctgccattagaagccatcccatatctcctcatcttcctcctcatccccagtgcctgtgccttccccttcctggagtggagaccaggggtcgtctgcctggcctggtgggacccccttcctgtgtactgcagtgactcacaggagccgtgtgaggtgggaggacgtgcttatctgaatgcaggagggagtgcaggcggggtctggaggccatagggggcccaggtctgaaagggctgagcccagcaagacctgcctgccggctctgggtgagaaagcccttaggtagaggggaggggacactgggatggggtcctgggctgtggacggaagggctggtgtgcccggacacggcagcacaggctccactcgggcccctgagggaccatcgtggtggccttggccatgggggtgtctcaggtctgggtaaggtggaagtgccgcttggtctctctctgcaccaggggaagagattgaggggcagggagacccaaccatcagcacagggcaggtgcaatgtgggggctcagcacagactggcacccctcacgccctccctatttctaccctggggcaggctctgtgagggaagcgggtgctgctgccaacccctggcaggctgtgagcgagcaggtgggcgggcaggactcgggcttcctgtttcccccgggagtagagcctctggcagtgagtcaccacagcctccatcgcccgtggccttggacagagaagagctcggcgggccatgtgggcagaggaggctgtactgctgggcaggccgctcccagcggggatgacccagcccatcggtaccgcccggtggaggaagtggacagagttgggagctcactcacctcagggacctgatggtggaccctcaccactgcttaccagatggtgtctcgggtgctcccatggagcagcattcagccacagtccacctgcgcccaggctctggagccccttgagccatgctgacagtctcactgcccctctgcctgggagtccaggggcaactgatggaggccctggccctcccagccagagccagctctcaagagtgtcccggaagcctaagtgagcgtcatggcccttggaggacacagacttgggctcttcttctgcagaggggttaacagcccccaaagggcagctcgaggagccagcgggacaggggctgcctgagggcttgggtcctgacggtgtccccgagctgggtcccaggcaccttgtgcagactctggtctgtggcagtggaggtgcggcttccatcctgccctgcactgaggctcaggaagatgctgtgtatgtcgggggatgcatgctttggggacacttggggctgtcacaccacaggcccatctctccaaaggggcagattccagacaaggagtcccagtggggaggggtggggcaggcagccaccccccgccatgctgcaccaggacccagcccaccggggccactgaagccaccactggaggcaacgtcagggtcgccaacactcccaggcattaagcaggacatgagaggtgccaggaaggccctgcccactggctggggcttccggcaggcaagaggaagcttcgtccctgagcatggccagggccactgccttggctccttgggccaccccaagctgagtgccccaagctggtgccatggggcccaggcaccagggtcacctgggaagggagtggccgccttgccacagaaagcccggccccagtgcaggcctcccggggtcagaacactgccccagagcggcctgaccaggctgtttcattagctcctctgacaacagagaacggaacttgacttggttctctggagttgagcaacaccaaatattttttcacacaacaagctgagaagtggaccacaaacagggcccggcattgctgggaacacggggcagcgggcctgcgtggaggatggacccctgccggccccacaggcagcaactgtggatgggccaggcagggccagcaggagcaggaatgggtgcagaaggagggggcagcccagacccctccctggccctgctggatgcaccccttccattcacccgaccctaccccacagtgaatccagctgccccgcagggacagggtagctgggaacagagagaggcttctctcacagggtgaaggccccaccaggcctccaagcagaaggggttgcggtggggatgtctctaggaacagccctgccctccgagccctcatctgtcatccttaatagctgaacaatttctcagctggtcggggaagtgccttgagacctgggtgactcggtgtgctgagggccttctagaatcatccctcctgcgaagagcctgggattgcataagtgccctcctcctgcccagccctcccagctccatcatctcttcctatcccctccccacccccatcatcctgcccccacacaccagcctggcccctgctgaagaagcagggggcccaggcagccttcctccagagggagctttgctccgcctctcttggggctgggggcgggggtcctgcctgtacccccaaccccacctgctctctgaaggccactctgggaccctgagctgagaaggcccgggagccagccccagctccctgaagggcactgagcccagagtttctgcgtgaaggcgtgagtggcctgggcaggacctagggcacaggtcagctctccttcgggggtgctctggggaagctagggctgggctgcgcctgcaccaccctgctcctgccttagggccccaggtccccatgtgacagactcaggtgtagctggagctttgaaacagagggggacagtcaggaggaagggtgtggccaggcctgacccaaaggtgagggtggggcacgagggacacacggccgagcccaaggggcagtggtggtttaggggccgtgaaggttcgaggaggagtcggggaaccatgcagggtgagggctggggtgggagaggcctggagctgagtttgggaagggtggcccctggactgggggacccccagaaggggctgaagtggcccccaacgctctcggcctgagctgctgggccagccccagcctcgaagccactccgctccagcaccgggtcccctggcgtgcctcctgcccagagctgctgagctcagggaaacgccagcctgctcagtccctgggggtggtggggtagggggtggttatatttaacattctgcccggggccatcctgctgtgtgcaggcgtactaatagggcagggaggggccaggtgggatcccagtcctgcccctggcccttctcgccctggggccctttccagagcaaacacccacaggcttgggaggacacggccagcctgagaaatggccttggccaggccggtggggcccaggcaggctggggtctcctggccgggggagggtgccggccatgcgcataccaggagccaatcccagagcctcggggccgcctgtctgtctttcctggacccccttggtgtgccacctgcatgattgagtcaaggtctggtttattggagcaggaaaggcccgggatggtgtccaaaagttctggcaggttccatgtgctttacggtgtcctgagtgagtgaaatgcatgtcatgatttctccagtccctttccagctcagggtcggtttgcctgtgttgcccccactcgactgtggacagggctggaggccaggcctgctcgcccttgtctcctgggccccctaccaggaagcagggtcctggaaggtgggcctgagtcagggtgggggaaggtgacgcctctgctgtggagactgtggctcccgggtgggctgcaccttcctcctagccctgtccctccctccgacggtgggttccaggggcttgcgttgcctccagccctgggtgaccaaggagtgggcaggatcaacaggagggccacagaggctgtcggtgaccagggcccatcacatgtgaacggtgtcttgtggggcatcacctggctgtgggggcatggaggagggtccgtgatacccctgggcccagggctggctcagtcctcagcctgtgcgtctttatgactcaagcggggggcctctggctcccccaaacacacccccaggatatccagggagaccctgagagggcgaatcccgcgtcccctggggctgcatcccccgtcccacccctggggccggcacagcggggcacacggcttcatcaccaagcccatgtcccagggactcatgtgtgtgacacaaaatgaaattcctcccgcattagtgtaaaacagaacacagatgcccagtgggaggggctggcatcctccgcgtcaggaagccaccaaccgtttgggcttcaggttgtaattcccaatgcgctccctccactgttccgtttccatcatccggcgcgtccagctgaaatggaatgggtgtaagtgtgtttatgcctcgtctcagtcttcccagctgctatggaaaagcaccacagacccggcagcctcagcaacagagatttatttctcagttctggaggctggaagcccaggatcaaggcgccggcggaccaggctcctggtgagagcatctctcaggcttgcacgtggcgtcttctcactgcgcccacggggcagagaatgcaggctctctgctctcttcctgtggggcactgctcccatcccgaggccccactctcatgaactcgtccaagcctactcacctcctgaaggccctgtctctaaataccatcccatcagcggtgggggcttcaacaagggaatctgggggtgcaattcagcctggagcaggcttggagggaaagaaggggacgctgcaaaagatgtcgtgggaaatcctccgggggattaagttgccccttcatttcaaattccttaaacttcaagggcatctgccaggtccctcgggagagcctcctgcatgcagctttcctctcctctccagcgctcatcacaacagcggccactgtgtgagtgaaggctgaggccacactgcctgtgcctccccagcagtcagtgacgggcgtggctctccgaggcagtgaacttgcagagtgcaggaagctgggggctgcagagctcgcctgcagggcagcaccccagaggcctggcagggtgggtgagctgtcccgtgacccgtcacccctccaccaggtcccaaaagcaaaagcgttggtggggtgtcaggagttccagctgtacctagaaattgtcctgcatcctgttccaggagatatcgtccatcttggggtcaacatggaatgccacctgcatgaacagggccggcgccggcatccactgccattgcccgaggcttggctccacagggtggcaggcagggaggagaggctgctgctccctggcaggaagttcttgtgcaccacgtgagcgtgtggctcccgaaggggcattttgtgcctgtgcgaccgacagctgtgcccacgcgtctgctgcatggccatgtctacacggggcctgctgcctccagagggaccctggggcttggggggcctcagagccctgtcagtaggaagggggccctggctctcctggtgggtgtccggagcatctagagctgtcccgggaagtgccgtgtcccagggaccttgttactgatgattctgccagtctggcaagtccatcaaaggcatcaccgccttcagtgccaggccacccctcggggcttgcaggcctggtgtccggctgcccccagcccagcacaggtacctcatgtccttgaacaccccctcctccatccagtctgagcgccatggctcagcgcagccccgtcccagaccagtgtccgttcccctgagggtgctgtgggctggggaggcccaggtatccctgccaccttcactctgagcccgtctcttcctctccaggttttcataagaggccccgggaagctccatgccctcctcccagcactcctgctttcccctctgaatttttatccatcatgggcccctgaataagagctgactgtgggatccaggctcagaggctcgagaggcacagggggagggcaccaagggccttgcagtccaggccagcctcagggtcaggcctccaggggcctcaactttgtgtcctccccatggggtgcttttcatccccggaggccaggctgggggtggctcagggggcaccatctgcacaggtgggggcagccgtgggcgggtagagacagcgggccccgcgtgcactcccatcctgagccccctgagcctcaaacaagagtgaaggcagtgcccagggaagcacaggccaacgggggcaggcacagccttgtggtggccagagaaccaggtcctcacctgcaggatccaggcaggccagtggtcggcgaggggcgtggccagtctgcctgttccttcctccacgtatgcaggcattcattcattcagtcatgcaacagaggtcaagttgagtgtctgctgtaggcaccagattcagcaaatacaaatacaggatgcctggttaaatatgactgtcagataaacagtgaatcatttcccagtggaagtgtatcctatccaatatcggggacgtgcttatacttaagacaattattttccatctgacattgaaacctcaccaggtgtgtcatgtatttcattgggatccctagctccggctgggtcggctgggctgccccgagaggcccaacatgaaggccccggccacccacctggattggagcttcctccgcccaggcagagcctgggctcctgcaggcacagatgggccccccaccactggcttcgaggatgaccctgaaccttccctctagcagacaacagatctgacagggtcttccccccatgagagggggtgcccctgggctcccccatgtgatcctgagggtaatcttggtggaagcagcgctggggcctgtccctgccccacccaggaggcaactgcgtgggggggcgtgtggtggacacatgacaaacccagcccaggatcccttggtggctcaatggcccaaccgcctccctgcacagacaggaaaacggagtcctcagaagggcggggcctgtcgagggccacacagctgccgggggggacctcagaaggaggggtctgtggagagtactccaggtcccctatagtgtttgaacagggccttcgaaagattcctgtcctcccagaaccccagaatgtggcttatgtagaaacacggtctttgcagatgtgattagttgaggatctcaaggtgaggccattctggaccgaggggctcagatccagtgacttatacgaagagaaggaacaaacccagagacacagagaagaagccacgccgggacagacgcagagatcagagtgacgctaccacgagcccagggccaccaggagctggagacggcggaggacccgctacgcttgcgggggagggtggacctgccaacaccaggattttgcattctggtctccagaacagagagaagagaccgctgtagttttgggcactcagtttgtggtattgagccccaggacacccatgcacaaatgagagggtgcaggggtcactctgggacagcaccaaagccgggggggccccaggggccactaaggaggttcccacgtggagctgtggctgcccttgctgggtttgggaccctcagccgggtccaggcggacagagtctgtttccagcacagccccgtccttttgctgggcggtttgcctgggcgtgtcctaagttgattgaatatatgctggaaagcagaaatgccggaaaagaggccccctcccacccgccctgggagcccaggtctggcaggaggaaccacctgggcgataggggtctggggaggaagaggggttggtgggcagcagcctccccggccaccacccaggagccatggctgtgggggctcggagtggccaccccacccaggaggaggggcctgtcagggcaagagacccccacatcctcccctgaccttgatccacagaagggccggcaaaggactggggagaggcctgcagtcgtgggggcagggggatgaggggaggggacaggaggagccagggcgctgtctgggctgggggctgggctggggcaggggcagctgagggcctgcggtggatgctcccagcccctctccacagcactacgtggcacagggccagcagcccccgggggagactcccggcctgcagggccctctggggcctccctgggtctcggatcccttccagggacctggatgaggccgtacccccagggacagaagtgcccctgggagcaaagccagcccagtcttgggtggcctgagctcagagctccccctggcttctgtggctcgccatgtggccagggccgcatctttacccccaccccgttccaagcctcagtgggtcccttggtaggtagaacctgttgggagggtaaagcgaggcaccccaggtaagccaagttctgctacggacggggccccttggagacccagatcagactctgccaaggcctcgccctactcccgcccccaacctgatgattagctaattaattctgtctctccctccctctatctctccttccctctctctctctctacctctctccctccctctctctctctcactctctacctttccctccctctctccctccctctctccctctctctctcttcctctctctccgtctttcctattctctctctctctccctctctttcccattctctcactctctccctgtctctctccctccctctccctctctctttcccattctctctctccctctctccctctttcccattctctctctctccctctctctctctccctccctctccctctctttcccattctccctctccctctctttcccattctctctctccctctctccctctctctttcccattctccctctccctctctttcccattctctctctctctccctctctccctctgtttcccattctctctctccctctctctccctctttccccttctctcccctctccctccctccctctctccctccctcttcctctctccccccctccctcccccctttctccctctctctctctttcccattctctctctccctctccctctctctctctctttcccattctctctccccctctctctctccctctttctccctctctttcccattctctctctctccctgtccctctctttcccattctctctctccccctctctccctccctctttctccctctttcccattctctctctctctccctctccctctctctccctctctctcccactctctccctctcttttcccttctctcccccctctccctctctctctctctctctttctctctctccctctctctctgtcagtttccccactctctgcagggtcccctccacagtgattagtcaaggcccagcccgaggggcctgggaacggggagggggagcccagccgtgtgtcacctttgggagaggaggacctcttccatgcctggtggtactgttgtgcctttgaagggaggtgtggcaccaggccgggtggtgtccgccatgccaaaggccactctgcatcccggcccccagcccctgggtactgctcctccagcccccactcgctggcctggattctccggacagaggtggggcccacaggggagcaaaggaccatccagagagcgtgggtctgtgccagggcccttctcagagcagccgaaggatgaccatcctgactgaccgtcccaatctgcagcctgggactgggacctgctgtgcagggctctaaaaaggcgagtgagggaaagatgttgcagtggggaggccatcctggcccaaaacgcagtcacaaagtccttaaaagagggcggcaaagagggttaaaatggcaatatttgtgttatgcacatttactacaaaaacaagcttgccttaagaaaactcaaaaaagaaaaagattaacaggcagaaggagatggccgtgtgaaggcgggggcagagactggagtgatgtggccaccgccgaggggtgcctggagtccccagaagttggaagaggcaggaaggaccctccctagggcctccaaggaagcgtagccttgtgacactggacttcagcccagggacactgatgtccaactctggcctccagaactgttgcttcaagccccccgctgtggtactttgttatggcagccccaggacaccccgacaccaggaaatcgcataattgtttggagggagaacatcggggcagattcacctggtttctatgtggggcagaaaagagccagcggccaagccacccgcaggcccctccttgggaagtgagacccccacagcctcactgcggatgtaacagccacccacggcctgcctgggaaaagcccagatttcaggaggccctgattaggtctcccaagactcacgccctgttccgggggaacaggaagtgggaggcatctccccagaactcagggaggccaaggccatgcccacggaggggcagagagccgggggccggagagtgagggccgcagccacgggctgggaaggggagagggccgggcaggggtcctgggagaggggcagcccaagcccagcttggagagacatctccccagcggccccggcatgtgctcagcagctggtgagctcaatccaggagtgttttgccgggtctggttatggtgattcacaaacccctttttaatctggaacagctcccaccaggcgggtcccccaggatttcccaccctacccccgggattgtgaatctgagacatcacaccacgattgtcacgtgacatggtgttcgggattgaactgtgtcccccaagatttatatatcaaagccccaacccatggtaccttagactatgactgtatttggaaattggttctttagaggtaattaaggtgaaatgaggtcattcagttgggccctaattcaataggactaaggcccctctttatacaaaggaggaatggggagacaggtatacacgggagatataattaagttcgctgagcagttgaatttgaattaatcaaagggcgattatccgagtgggctgcgtctactcacacgtgccctctgaaagcagcgtttcctctggctggcagtggaagaggtgaagtgactggaggcagcagggaactgaacacatctgtacttgctttagagatgagggcatatgccaaggaaggaggtggccctggggagctgagagcaaccccctgccagcggccagcaagaaagggggtcctctgtcccactgtgcaggaggggattccgcagatggcgggaatgagcctgggagcagattcctgctgggctccagatgcgggcccagccctgcggatgcctccgtctcagcctcatgggaccctctgcagaaaaccaagctcagctgtgcgcagacttctaccctacagaactgagaagtgataagtgggtgctgctgtgagcttccaggctggtggtggttcgttacgcaacagaggtagcacgtacaccaggcctctcgtcctgcagaagtttccaccgtctgcacgtgtccggtggcctctctgtgggtggttcagcttgttcttctgcctccagtattttttgcaaagtggaagttgggtctgcaggcctgctggacagagcttacttgatcgaggcttgaaaatgttgcacgtgcccttggtgtctgcgtgtggcctcaggtcctggttgcccgtgtcaaagatggcctgatggacctgctggggccagcccaaccccaccactgggcaggtacttccccctggtcacctcaaggtggcctgtggctttacgagcacccagtgttccctctgtggctcttggccccctctgaaggcccttcccaagcctgtccttccactgggacctgggaggtgcaggctgcctttttctcttcctccctccatcagcgttacccacattctcctctgcactgtgctgatccttcatccatgggagctgtgcacccccaaatataattcctgctggaaacaccctcgaccctttctctttaatgacagattttcacagtaaggcagtgttgaattgcagcctctagtggcgacaacaaggaaaggggttccctggactcccccttcggagcatcaggtgtggacccatggagttccgtggacctgccgtgtgtggtgggccaaataatgctcccctgaagatgtccatgtcctgatcccagaaacccatgactatgtaaccatgcgtggcgagggggaccacacgtggtgagggggattagcagatatgattaagtggagggccttgaagatgggaaattatcgtggatgatctgggtgagccaagatcatcacagattcctaggggagggaggcagaggttcagagtcgctggagaaggagatgagcaggggaagcaaggactggagcgatgggaggaggggcccagccggggagggtggtggtcaccggaagctggaagaggcaaggaaatggacccctccctgggactccagaaggagccagccctgccggcacttcaggcttgggatttcggacctccgggatggtgtgcttaaaacacttgtgttggccgggtacggtggctcacacctgaaatctcagcactttgggaggccaaggcaggcagatctctcgagctcaggagttccagaccagcctgggcaacatggcaaaaccctgtctctacaaaaaatacaaaacttagccgagcatggtggtgcatgcctgtagtcccagctacttgggaagctgaggcaggaggatcacttgagcccaggaggtccaggctgcagtgagcgatgttcatgccactgcactccagcctgggcaacaaagtgagatcccgtctcaaggtaaaaaaaaaaaaaaaaaaaaaaagtgtggtttagcaattgaatttgtggtcatttgtaaccacagcagcaggaagcccacacgccatgtttgaatcattgtcccctctgagatcccaccgcctccactttggccaatgggagcccttcccactggcttccgtacccttggacatgaccccattcctctttgcaacttccttgttctctagcaaaactagattttccacactctcgaaccttccctgccctgagtcagtcattctctggggatgggtctttcagcgcggctcgcgttagaatctcagtcgcctggcgtgtcttcattttggatcacagtgtcctgcatacccacaatgttactaattttatcattgtttttactccaccaaggtttaaatgcttacctgttctataaccatattttgtgtaattctctaacgctctgtagccacctcagtgggcttcccgctgcccacccaccctttcatacggcttcttcacgctggaattctttctttggcatttcttttagcagcttcatttcatctttgaggtggctgtggttgtttttctcccaacaagggcgtgtgcatttgtgccgcgttctctcacgttcctttgcgttggaggacatcgcccctgtgtctctagactcgagtgacattttggctgggtataatagtcctagacctcattttttcccattagaacttgatcagcatgggaccgtcatcctctggtgcttagttcactgcagaaaatctgcagccagctcacttcacccccttcgtagtgactcactggttctgtcttgtgcacctgcagaatcttctttaccctcagctgaggaggtggagtaggagccatatctggatggaatgcatcctgtgtcttgttttcctgggactccgtgcacagttctttctttgcttcatcatcacatatctaaatacttttcaaatatgcgtgtatatatatatatatatatatatatatatatagagagagagagagagagagagagagagagagagagagagagagagagagggagtctcactctgtcatccaggctggagtgcagtggcatgatatttcagctcactgcaacctccgcctcccaggttcgagattctcctgcctcagcctccccagtagctgggattacaggtgcccaccaccacgtccagctaatttttgtatttttagtagagatggggtttcaccttgttggttaggctggtgttgaactcctgacctcaggtgatctgcccgcctcagcctcccaaagtgctgggattacaggcatgagccaccgcaactggcttcaaatatattttaaataccaaaaactagttgaggcttctacccaggggtacaagcaatcctccagtggaagtgtcctcacccttcctccggtgcctggatcttgttgtgcctttgctgtgctggtcagagccagccatctgtgtctataatccaatttcagccatgcctctcctgttcctcctggcttgggctcattgagtcataactgtatggcgtgtgggctctccgcttgcttctggagttctgtggtctccccctctgccactggctgctgagatgaacaggctcatctcatcttcgagtgtggcttccattgcaccttgtccttatcaagttgacacagtgcccaaattcctcctggggaacttccttcttctctgggttttgttttattgttggccgggttctttgtctgctgaagtccaacctatctctctctctctctctctctctctcattctctctctcttctcttttttctcccttccttcctttccttcttccttccctccttcctggggctccatgcccttctcccactgggggcaatcaagaggtctcacctcagtccaagggtcagccctggtgtctccccagccagacagtgaccaaagtcaggacacaccccctggttgcctcctgatgagggctaagggtgaggattccggcactcccagtttggactcagaagacaggagcagtgtggggagcagcaccgcctgtacctcctctgtgactcccctggacaccctccaggaggtctgtgatgctgacctgccctctccttgtcggctctgagtcattcatctccagttcttactatgcttgtttgttgtcctgggttagtgcagccctcatacctgcccccgcacctgcccccacacctgccttcacacctgcccccacaactgccccccatacctgcccctgcacctgccccacaactgccctcacacctgccccccacacctgcccctgcacctccccccacacctgccagcacacctgcccccacacctgccctcacacctgcccccacacctgccttcatacctgcccccacaactgccccccatacctgcccctgcacctgccccaactgccctcacacctgcccccacacccgcccccacacccgcccccacacctgcccccacacccgccctcacacccgcccccacacctgcctcacacctgcccccacaactgccccccatacctgcccctgcacctgcccccacacctgccctcacacctgcccccacacctgcctttgcacctgcccccacacctgccctcacatctgtaaatgtcacactgcccagccctgcactcctctcccacttggccagtttcaggctgtaccactccaccgaggtgaccccagctagtttggggcttcagatcccactgctgagccggagacccagatgggtctcagactgacagtctcagactggcagccccccatagcaccaggcgtgggtgcccacccacgagatgtcacctggcaggcactttgagaatgtccagaatgggtgtcataatccaccccccgcctgctccttttgtcttccccaccttggggtgtcaccacctgcctgttccctccccccagcctgggcgctgtccctcccccctagtccttcaggaagtctagccagtgccaccttcaaaacacaccttggatccacctggtcccctgtcctctgtccagcccgcagtcccactcagctcgcggtaggcaaagcgaggccccaccctctctgcagggctcttggagacacgtttgaaccacagcgtctgtgtgctctctaaaagggcagttgttattttttcctgagtttccaggatgtctgcccctgtgtagccatagggtcgagcctctccaggctccatgggagcagaaagtgctggggacacctcaaggctcacgtggctctgtggaccccgagcctggggccccagcccaccttcccctccgtgcctggctccagccatgggccctgcacccgtcctggtgccctgaggccaggaaagggggcttctgggactgctgctcgatgccgaaggtattgtccttcccacatgggaatcatctcactggactttctgtgacaaacatagacagtcatttcaaaataaatcaaacttcagacgtggtacagcagcaagttgcgaagatcctcctcccctccccgcaccccaggcggcacctgctgcagccggctgtgggcactccatggacaacacggcacagatgttctcttgtcacataactctcatcctgtacttcaaaggccacgagtaagtgaagacccactgcactctcgaaaagcaggaacggaaaaagtcacagcactgcatcatggagcagccgccccgggtgggcgcgcgcgtttgcctcctgcgtgaggcttcctccagcactgcggtgggctgtgggttcgttcccagggaatgtgagcgagccgcatccgcagcccaggcaccctccctcccagcttcctccccgccccagggtgaccatgtatgggcagccctgatgtccatcggccctttgtgcagtcatggcgcggtgaagggccctgcaggcggcgcccaggggtggtgcggggctccgcctggtctgtttactcacagcacagcatggggctcactcagcagcacgcccaggagaagagcccagcctcattctttacagccgttctggggcactccacaggagggttgaagggggcttccatctgctggtgctccccaacaccaggggctggcagagggtactcgtgctttgcaggtacaaacagcgctctcccctggggtagacccgagccacgacaggcagccagggcgacatgcataggagcgtgtgctcagaccacacacagtggcttttcaggggattttccttactcagccacatcggggagggcgctagggcaggtatcgggagcgccagtgagttggtcattttctgagcatgatggcggctcagcgtttggacccccagagggagcagggccctgtgcctcagcctccctcgagtggtccagccctccctcagcatgggtgctgaagaaatggaagcctgtgctgcctgtcagggacctgccgctggagttttacccccaccccatccgcgttggccacccaggcccctgtggcacgggtgcatggaggcctagtgaggtcagaaaccgtccagccaagggtggggggattcagggtgggggaacaggcagccggctccgggagggcttctggtgtgagtttggggcgggccggcccactccctggagttggtgctgtcagggggtcctaggcccacctgcctcccacaggcctctgtactcactgggccctggctgttggttgggggaagaaatagagacagatccctggcttgcaaggactccaggtctggggtcagagcgtggacaagtccggagggctctgccacccggcactgctgaggacaggggcgcatctgacagcctcctgcctctaccgagctggcttcggggcagctgggcctcccggtgccaataccccccggctgttacctgcctgtcacctgggcgagtcacctggagccgcgtctgtgacatggaagggaacggttacaaaagccacatcatgtgagatgtgcgggcccagccaggcatctggggcagaccagcgctgcacacacacaggtgggatctgtgcccggtgcccagcctggcatacaggcaccatcccggagtgcccccatgggctgtgccctgacagctttggaggtaggaattggggggtgaggaccctggtgaggacaggcaaactcagccatcacccccctggccagggtactacacccaccccacaccagggctgggggctaggggtgggcacagcttgggcaggccatcctgagcgccaggcctggtccgcaggccggctggagggccctgccctgccaagcgggactccggctcctctccagcatctgccgcccggggtgggcgcccagggccaccagccctcgcggctcctcccctccccccgtgcgcgactgtcattgttaccattgcttggcttctgccaaagcagccgcagggccaccgggtgcttgaaccttctccatggggcgtcctggcggtggtttgagccgggcagtcctccccgccctccccagccccccagccccggcacccggccgttccactgcgcggcggcgtggggagggcgcggcgcgagctgagatggttccgcccggcgccgcccccgctgcccgccgcccgccgcccgccgcgccgagcgctcccgcaggatggcgcgggccaagctgccgcgctcgccgtccgagggcaaggcgggcccggggggcgccccagccggcgccgcagcccccgaggagcctcacgggctcagcccgctgctgccggcccgcggcgggggctccgtgggcagcgacgtgggccagaggtaggggcgcgcgggcctgggaccccgcttgtcaaatcgcgcttgcatcctgctcgggctgcgctggctgggctgcacctgcgttgcctgcagcccggggaaggggggaggccagggtctcccctcctaagcccaccacagcgccctgcttcctgccgtgtctccagcctttgagagcctgcgggaccccccactccccccacgtaggggctgaacacggcggggctgcaggtgagactgcaggggagggaggaagtggacccagctctgtgccaggcactgggggcccctgcccgagccctgtcccacaggagccccgatcttgttggtgccagcgccactttgggggagacagggccggcatccgtgtccccaccccagaggtgagtgaggccgaagcctgcacagcaggtcagggctgggacacagggctcaggctgcctggggagccctgctgtggggtatgcttgggctggtgtctggtgcttgtggcaggaggggtgcaggtggccgtcctctggggatggttgggcaggtggagcagcgcctacccctccttggctcttccgcaagctcagggtgggacacagcacccccatttcacggatgaggacaccaaggcctcatctgcagcagcaaattcctagccagcacctttcccgtgccaggagccgttctagatgctgcgggggaaatgaggatgaatcagacctggcctggtgtgggcacatgtcgtgggcacggaacctgttcctgggagagagaggtgcaggccaggccgggacagaagagccggggactcctggggtgctggtccttccgggacaagcatggggagatgggcaggggccttccaggtagcggaagcagtgagggctgaagtttcatcagggctggggggcagggctggcagagcagggcctggcagatggcagggccaagggtgcccaggagcctctcccttacccctcctacctggctgtgggctgttgggcccctcccggcacccccatttctagctcttcacagcagccctgggggggcactgcccagcttagtcccatttgcagaagaggcggttgaggctaaggtcaagcacctggctgcagcctcctgcagctaatgggcagcctccgccagggaggcgagcactggccaaggccctggggaccacagtcccctccccctcctcttcctggatgctggcgtggggggaagggggagggcagtgatcctggaagccctgctacagccagccctcaaggggcaggttccttgccccatccctgttcctgcagggcccatagggatagcaggttctgcccaggctgcgtctgagcccgcagtgcagtgcagcatgggagctgtagcctaggcccacctcctccaggaagccctcccgcatgttcatcccagccctgtgggctatgcactgtgctgacggtttcacatgggtggcctcgctcatcccccggcagcccctgaggtgcagagtccttatagcctccttttgcagagcagaggtaatggagctgctgcccagctgggctgagcagcccctgggcctggagcattcatacaacagggctcgcgctgagatgagtagggcaggctcctgagcagaggacttggtaggtttgttcttctggagtgtggatctcacggaaaacacaggcgaggccagagccgagaggcaggtgtggtctgccccagggagctgggggtcgcagtgcccgcagctgcctcatcctgcaggcctgagctgccttcatgggccagccagggtcccggctccctcagccctctcagactctgcccgtctcattgttgagaagacagtgaagcagaggagaggtctccactgcccaccagggactgagccacaggaggcgttgtcgggggagggcacttgctcctggtgcccctgcccagagctcccctaacaccctgtgcccacttatgggtgctgcaggctggcctctgtccctcctcccacacagtccagctcccctgaccctgagctccggggtctcctccttccttctcactcccctgtgtgaggctggggagggattgggagctgattagacagcgtggcttcagtggtggggtcaggagaccatcactgcaaagcttttgagtaaaagtgcccaatggggggacagggcctctcagtgagaccccgctgcatcaggaggccctgagcccctctgtgtccctaccacccctggacctaggcggccttgcccctcccagctggggtctcccagcctcatgcctgacttaaggcaccaacacagccccctccccacatcctctccggggccgttcccccagccccatcctactcttctggccctagcactgcactgggcagggggcccatgctgaggagctcacctggactgcgtgttctgcccccacaccatccctgagggaggtggggcacctctctttgaccccagggagcaagcctgaggcccccacacagcctgaggtctagcgtggtccagttctcctgccactgtgcccagcaccccagtgtctatggcagccacaggtctgtcagtccagctgtggcacgcagagccccggccccgccccaagcccctcgccctgatgttccttggctcaggagatggtcccctgagccccccgaccccggacacccttgccaggacctccctcccctgcagatccagaccttcatggttgcccctctcctctccaagaacctggctgctcctccatgcccccctcaccccgggcacacgcccggcgccccaccctcttcatggtgttcacaccggctcggcacaccccttcccctgggcctgaagccccccttggagcttgccccagatggcctctctcccaggagggcccctcctgagtatggtcccgtcacccctgaggtgcccccgccctcctctggctttgccccgctccgggctgcacaccttctttccacacagtgctctgcgctctttctcccccaccctagaatgcacctgtttgggcggctggtttatccttgacccaggagcgtgcacagggagtgcccagccgcaggggtggggctgtgttcccaggccctcgggggacaccaggccctgtctttcaggggtgtttgctgggcccacacctcatttattgtctcacagtcctggaggctggaagtctgagctcaagatgtgggcagggctggttcctcctgaggcccctccccttggctcgtagacaccatcttctccctgtgtcctctcctggccgtcccgctatgtgtgtctgtgtcctcatctcttcttataaggacaccagttttgtgggattagggcccaccctcatggcctcactttaccttaatgaccgctttaaaggcctcgtctccaaacatagccacgtgctgagatactgggggtcaggacttcagcatgttagcctgggggcacaaaactccgcccgagataagggggtgcctttgttgcgtgtgggaacctgccgggacctggctgtgctctgggcattccccaggtttagaacagaggctcccaaactcccccaagcagggaaccccctcttccccaaagcatcttatgggacttggggttgtggggtgcagagggacactccactcttcccccagtcagcccagaggggctcctagagagcccagagggtccctccctctcgaggctggcagctgagactgctccttatgggcacaagtcaagtggggatggcccctcctcacctgggctccttcccgaccccagccccaggctctgcaggacacagcagggaagcagggctaagcccagatccttccactgaccactgctgccctaagcagggctgagaccctctcctgggagggaggtgacggcttcgggtgcaggttctgttcgtgtgttgacagcgagcctggccatgggaggtgggtgggcccagggatgaggccctcaccacttggtcccaacagctaagttagggctggcagagatgctgagtggcacccaggccaccaaccgctgggacaggcgagcatcagggtcctcctggaccaccgtgggtttggatgctgcggatagaggccgagcttcctcagctcccctcccctcccctcccacccctcaccctgcagttcacttggcagggtttgtgcagccgacagaccttgtttgcacagagctccagtcctcagccaggttctgcacaggccagcaaagccccaggtccctttgcccacaggccgctgccctccccttgggagtccctgggtggatcctctacccatgtgcttggtggccccttccaaaatcagtggggacggctgtcctgggcctcaggctgtgggacatctgacaggtggtggcttcctcaacactcagacaacagggccttgggcagagtagatgggaggccccatgcgcagctcagtagacactcagctagggctatatcgggagatgcagagggacgcggccagggagcacctgggagagaggacacagtgggccccagcagggaggagcccagccagggcctggccacgccggacctgacccacaggccaggcagacccgctgccatgggctgaggcactgccaggctcctgccagcctctgacacggctgttgccctggctcagagcttcaggcagcaccagggtccagcgagagggaagctgagccggacaaacacgcagaatctgccagaagctcccagcaaacccaaagatcagccccattaagcctggggttctgcctgctccgtgtggagctgctggcccggccaccatgcccagccaggacctcggccctcccaggggtgtgtccagcttctgcctcccccagggaccagaagctgctagggctaggggcaccaggagggcacctgcccacccggagagcctggcgtaggccgatgagcgtgtgcctgtgaccccaggctggcttcctccttcctgcctgtgtggcctcagaagactgtggtcctctctgaacctttgttttcttttctgaaaacatggttgttttgaggattaaaagagagaggtccctctgaagtcctttgaggaggagctggtccaggacaggcacatagtcagtgaaggcaaagaccctcggcactcccaccctgcccagcccccgaccaggccggccctctggagccctcagctcccatcagcctctctctccgagttccgaatccagtgcaggttgcaaccaccttggtgtcagccgcctgctggccagtctgggacaactggggccaggttgcctggggccaggctgaaggggtagcaggtgtgtggctgctggcgtggtggagggtggtgtgtccaggtcccctgagaggcatcagctctgagccctggcttgtcctatcgcagggagccttggggcagggctggcgggtgcctcacccgctggtctgggtgtagggcaggggagtggagacaaggggacagcctcgcagacctcggcatgaggtggagctcaccgcgctcgcttctggatgctggggaccacacatggggcctgggctggcttcgtgctgagcagggccagggcgagtgcccaaagcatcgtcacctgcttgcgtggctgaagggtggccctctcctcgagtgtggttgtcacccccccatctggcccaggcacaggagggtgcatgcgcggggacctccaagcgggctgtgctgctttctcgggccctgagggggccaggcttggctcagtgcccccacatggctctgcacatggactgcctcccacaggcacctctcccgtgcccgggggcgccaaaggtccgggccccccagagcctccctgcgtgtctgtgccccgcctggtcccagagcccaggctctccatctgtctgtctactgccttctccatccgtccgtctatctgtctgctgccttctccatctgtccatctgtctcccgcattctggttgatgcccctctgtgtccccaggcttcctgtagaagatttcagcctggactcctccctgtctcagtaagtgctttgcaagggaggaactgtcttggtggcagacaagggctcttagaggtgtgagagcccttgtttctggggggtcccctcaacccagcatcccctgcagctgggccagggccaccggcacctcccagtacccgctggtgcctctgggtcccaggtgctggggctggagacaggacagtcagtgtgcccccttggagaggagcctgaacttgggaaatgggctccccagaggtgggtggtccgcagcctcaggagaggcggatggcagagcaggggcccttgtcatggtgcctcccagggacaggcaggcaggcagctgctggggcctgggctctggctcagcccaccttggctgcctgtgccggtcgagctcccaggagctgggatgcgctctcggaggctgtgccactccccactgagccgccggggctctgccggtggtgcttcctgacttcagctaagatgtaggtcaaatggaagaggctttgaggccagggcagccaggccctgcgcactcctgggaagccccccgctgccatccaccttcagcgcggtctccaggaggggccccaggcttactgttccatgcacggcaccagcagcagaaaccaccgagcactcagcactcacggctgttgagcatccaggggctgcccggcacccatggtgggacctattattatcccaaaagagtcctggaggctgggaggccagtggccaccaccggacctctatcttcccagcctggggccccatggtgcagagggtgacgggtgtgagatagaagccgtgcccaccacccagggttctcctggccccaccccaggctcccgaggagtcgggtctcagacctgtggaggaaatggatgcgtctgcagccgaggctatagtgtgtgccgccgtggcacggtctggacacagccgatgttcctggacctttggaggcccagctggactcacccttcagccctgagccagcctcacctgggcccctggccaagctatgggggggccccagaggcccaagggtgtcaaaacagggaccccagggggacggagacatgtgtgtgccctttctgggcccttgggcgtatcagatgctctgtccaggctcagaatagctggccccagggttggcagtgggcctgaagcctgccctttcttcctgcctgcctgcctggtgctgggggcagaggcctgcgtggagctcccaggcacctgcctaagagccagccggcacccagccactgccagagagaggcagctcggacctcggccccatgtgagtgcagggctatggtgggccccgaggcgtgtgcctgacagcctggagctggtgtggagcttcccggcatggccatctgtgtatgactacctgccaggaatccctggaaggccagtcccccagcctgcagctggcctgccggtcagcagggagaactgttgccggcctctgccgaccccatttgtcacagggcggccggcacttgcctcagagggtcccgtcttggtgtgggggtgggcaccatgagagcccctttgcagcacaagggcctcctcaggcagagcagtggcgtgagcccctgggcacaggcaggcagtgggcatgggtacacgcggggcccaggcctggctcaacaccagccttgcaggactggggcagagccgccacctggggacagactcccctgctgccgctacagggagccccaaggacccaggcctggcactgcctctgacctgctgagtgactggggcaagcgtgggcctcggggagcctcggggggctacagcgggcttcagccgtgtagggacggggctggccaggagctgcctgtcctcacggtgccagggacaagttgttcgccatgggccagcgccgctgacggctctcccagggccagggccagggccagggtttggcctgtggattcctcagggaccaaggcctcaccccagggggtacacaagggactgtctgaggctccctgctgtgtctgggaccccctggccaggcctgcccgcacatgcccatgagtctcaccggccctgcgtcttgctcctgggctgtaggccgtgggcagtggcggtccctggtgtgccccgtcctccccaccagccgaaatgcagactggcagaggtgagacgggcccggccccctgtggcgagtgtgtggctgcgccctgagcccgcctcccagggtgggggtcgggacccgtggccggggatccgggaatgcagcacccgctgccgggtgtggactctgggaatggcgatgttcccagacggatgccgccatgagcgctcacttgctgtttgccagataaacaaatgagtgaactgatgagtggatgagaatggacacaggaagtagattcttctgccccgtccttgcctattgtcctgggagcctgcgttcacaggcaggttcttcctagccctgtgggcggctccccacgggagttctcggtcatctcccacctctcagggcgttccaccgagcccacgcccagctcctgggagcaacttgccatgagcgggtcccctgctttcccaccggccgggccctgacaggaagcggagagtgtggccccacccggggtcccgcctctgcccgtggtccacacctgtggcttcatagcctgggagccacggtgagtcgaaggcctgcgctgtctcttttggctgacgtgggtcctgatggtttgagcagacgggtgctggcccccagatgagcaccggggcagcctctcaatggagcctgtgagcaagggcgtcgtcccaagagaagcctgggacacagaggccattgtttctatctcagcacagacagagctcctccacctgtctgctgtcctcgggacacgccgggagttggtccctgtcctggttcccattccccagggaggaggcccaggcgctggcaggtggaggggaacagccgggcagaggagcggcagggcccgtgtagcctcacagggctcactgggtctcagccctgggcctctggctgccgggccgggagcatgctgtgactctgaggagctagcggagccctccaggctaccagtgtccatgaacctctgccgcagcaaggaggcttgggccactctggcaggaaccaccaggcgggtctaccccagccgggtcggcctagagctgaccccagccaggcctctgcagccacaggctccctccccaggtgccgctgcgtgactcgtgaagacagatcgcaccagtcacctgaaatacactgcaggggaaaatggatcgttttcatctcctttttgtggtggtgctcggagaagtgggcggccacagttcattaaaaattaaaagcagaggaggcttcattaatgtctctggcatcgcaggctccagtttctcagggagtctgccaggccccagcgtttctctgcctccacgtggagggtgccatctgtgcaggtgggcactccccgctgagctccgtgggggctacccagattggggcccacagcccctcggtgaggggaccagggtctggctgggctctctccctaaggggggctcagtgctcttgtttctggggtgccaggaggaggtcaaggggcctcaaagagaagctgctgggggcgcgactagtcccagaccagcagccctcgaccccacggtgtctggggaggaacttggctgtccggaagccagtgaggtcctggcaatgggcagggttgcatctctctgtttcctggctgtggaggccaaggggagcccagggggacgcattggcttcgtggtcttgccaggcagctgcagaggcccaaggcccagaggtccagctgcaccaggtccacggggaggtaaagggaggagcaggagctccttggaggcctatgaccgatggagggttgggggcgtggccggagctggctggggagatggagctggctgggtgttgccttggagtggagtgtggggcgatggtcagggcggagctgggcacccccgcctaggaggagtggccaggcaggagcccaaggcccagagggaggtcagagggaagaaacatcctgagggcagagctgcaggacctgctgatggctctggtctaggggaggggagggtacaggagcctgaggttggtgggggatggttggcctggtgccatcaggaatggagaattctgcctcggggagggggagccggtggatgccagagggtagagtggggctggacggctgccagcagagccagttgggaagtcacccctgcgtggcacttaattcccgggctgggtgggagagaggcacctgtggcaagccctggggtcccccaaggagaacggagcggaggggagaacaacagagctcggggaggccgtgctgagaggcccagggagtagaggagattctggggtctggtcaccgtgaagggcatggtgaggctccctgccggagaggagagggtgggaggcagtaggagcaagtgaggtgagcagaccccccgcgttgaggcttttgccatggagggcgggacagtggtagggaggcggggagggtgggttcctaagctccatgcttttagggcccggtggtccctgggtaccgccggcagtgaggggaggagggccttgggagaccctgggctcagcccccgggggcagctcccgcctcagccctgcctgcccccctgacatggccagaccaggcccagcgcagcctggacctccagcatcctgtctgagcgaaagacatccattcagagagaaagacggcggacagaccccccaaagagacacttatgcagggaggggcctccccagccagggctccaggcacacagaggagaggcgtggggcaggaggaggggctgagggacacagcagagctggctacgctgaggggttgcagggcatgatggggcactctgggggcagactgaccccccattagcactggttcagacgccactggtctgtgggaggcttgtcccactgcctggccccaggagccctgagtatgcccggtggggtgacaagcctgcccccaggacttggcctgagcctcctcttcagcatggggcaagggcacccagagccacacgcctcttcctggaccctggacccttcttcatttcatttatttatttattattcatttttgagacagggcctcgctctgtcacctaggctagggtgcagtggcgtgttgacggctcacttcagcctcaaactcctaagttcaaacgattctcctgcctcagcctccccagaagctgggactacaggcacgtgccgccatgcctggctactttttattgagacgggggtcttgctatgttgtctaggctggtctcaaactcccggcctcaagcgatcctcccacctctgcctcccaagttcctgggattatgggcacgagccactgtgaccggcccctggccccttcttgagctctgtaaccagcagaggccactggggcagatcaaggcaggtgctgggactctaccaaggcccctcccgcccgccccacagcagccccaccacgaaggctgctgcacacacctggtccacaccacttaccctgagtgttgtgagctttgggaaacatcgaatgttttaatcactttcggagatgttggggtcaccagccccaggccaggcagtgacatcaaattctcagattcgattgataggagccagtgcctgctcagaggggaggtgaggctcacagcccacccactgggtgtcacagcctcctgccctggtggacagtgacaaggaaggggttgaggcaggaacaggggttaggctggtgcttacctcccccgacttctggacagctgccctgggacctctgcttgaacactgcctcctccacgcagccgtccaggatccttccaggcagcacaagtcttcctccaggctccgctgtctgtctgccctactgtgttgtggccctcgcgctgcactgggcagggggcccatgctgaggagctcactggactgcgtgttctgcccccacaccatccctgagggaggcggggcacctctctttgaccccagggagcaaggccaggcaccggaggcagcgcccgagggctaaggcagccgactgataggagcagacgtcatggagggcacagggccatggctgggagcagccgagggtcccatggaggacagcccagcaccccagggcacgggccgtttagggggacatgtgctcccccttcccagagacggccatgcctgctgcaggaaccctggctctgggtcttgctcctgtctgtcctgcaggctggcagcattggagttttcctctcaggggatcattaaaccctggcctagcctggcccgcatcccagcacagccgggcacaggagaccctgcgtccaaggctggggcagtgggggcagcagccgtccacccccaggctccatcctactcttggtggccagcctgggtcatgcaggtggccacggtaggtgagccacgcaatctccccaccccacctcaccccacctgccacccccggcaactggcacactgtggtctcttctcaggaccgccggggcccggttggaggccagagggctgggtggtaggccccatgagcagcggcgtgcatgggggttgaggggtgtctgggaaccagtggctggggccataggtgagcctgagggaaggggagcggcactggctggaggggccccacagctggcctgcgaggtgggtgcagggatgaccacttcccaccagcccatcttccctgacagcccttgaggctgcagtggcccatagccttggagcacagccaccagcggcctccagacagagcagctgaccatcagctgtggacagcctgtatgacgcaggtcctacggcatgttctgagcacttgcggtgtcctgagcaccatccccagggccatatgggcaactttacctcctggcaggtgccctgcacccacggaggcttgggcgagggtgtgtggagtgagtgccgcaccctgagccccaacagggcggcctggagggcccagactcacagcagcgagtgcccagggctgcggggaggaatcttcagaggagccgaggctgggtcggctgtctgctgggtgtgacggaccccaggaccctcctgggtctgaggtggagggagtggtcctgctgggccctgacttctcaactcctgcagttggaaagttggaagaagtcagtcaggttggggctcccggcgtgtccccagcctgagtccccactggccctgagcctccatgcccctctctgcttcttcagggtccaggtggagttctacgtcaacgagaacaccttcaaggagcggctcaagctgttcttcatcaaaaaccaaagatcgagtgagtggggtgcctggagggccactcccaggcagggaggtgttgagggcgccgggagcaagcctggcgatggcgaaggctggggctgtgagctcagggagagtccatggggtgggagccacctgagtgctgcgggggcatttggaagcagggtgggggtgggtctgcatggtgagtggggcacagggtagccccctcttagcttcacactgtctgagaccagggcctctgcagcgggactcgtggggacaccgtcctgcctgctggacaccaggctgggtggggcaggaccatccataggtgccagcaaggtctcccctgtggccacgccctgcctcccacccctccatacagccccaccctccccaacagctccctgccccgttcccagccagagcttggcatcatgctccccccgggattgcaggtgaggacttggggggtttccccaggggctccacattcacctgcctgctccccaatccctatcctgtcctccaagaagtggagtggcctctagaaatcccctgcaccccaagttcaggcacctgtaaggtggggccagggacagagcctcttggaggctgacccaagagcatcagcccccaaacaacgcagggcacacagagctctgcgtgcagcccgggtgtgggaggggagcccagctggggccatccagagagcccagccagacccgggtgcaggccctgctccccgaagcccagagctgggtcagagccctgaggccgctgccctccccgcaggcctgaggatccggctgttcaacttctccctgaagctgctcacctgcctgctctacattgtgcgcgtcctgctcgatgacccggccctgggcatcggatggtgggccacgtgcgcggccgggcgcggggtcccgggtcccagggctgagccttcccactgggccgttacagaagctgatggcgtccctgggggagcccctgtgcctggggccttggggagtccttccttccccagtgcctgtcccaggatggaaaaagccaaggactcagtgcccaggctcccgcagacggctcagcgtagggagaagggtccccatcgtagacttccagctgtgcccttagctactagcggacccagaaggtccacggaaaggctggagcatctaggatgtccctccctgcccccacaagtgtctctgtgctcacttgagcttctgcaggtcagggaagggggcgcccagtccccctggggaaagcccctacctgtttctgggggtgtcttctacccctcctgggtcccaaggagtcccctccccagggcccatcgtcctggggcccatgctccagggacttctgggagaggtgctgggggcagcaatctgcaccgtcaggtccttaccagcctcgcagcagccgcgatgagggtgggtgggaacttgctctctctgagtcctgttctgtctccttctgctgttgctgcttcgagaagtggcggctgctgggacctactctgtgcccagcgtgccttggcaactcctgctcacctctgtgtgggtcccaggggacatcagcagggccctgcggccctcggtgccggcctgtcctgagtcatgtctttggggaccagcccccaaccccaggcctctctctctggctccctggcactcggatgctgtgctctgtgtcctgtttcttctctcccctctcctgcctcgttcccttgttcactcgtccacttgttctgtcctgcctcctggtttccagaaatcctttctctgaatgtccttccgaagatggtgtctccagtcctttcctgttttacgctttccccatctgctgggcctgtttctcccgagctcacattgggccctgactttttcatacccgtagatttcctcaaatgtctggtgccgtttatgcgtaagagtgctcaggcgctgaggggctctgcagccacgtgtgtggtgtggttgtcaccatccagccatcggggtgaaccctgccagcatgctggtcccccctctggctgcgcagagcaggttcttccctggagagaaggcctgactgccgggagcctggcttctggggacctaaaggcgtccatgtaaacttttgctcaatcccccttttcacctgttaccccgtcacaagggggcctggcatccccaggccagagactttccctctcctaagaatgaacctcctgtctttgtctaggtcagaagagggcagaacccactaggagagtttgagaaggagaactgggccctgactgactctcaagctactttcctaggtcactccccaccccaagtcccagggtcccctggggcttctggtttcacatccccacagggcccaagtctgttgtgttcactgcccgtcccctagcacagcgtccaggacatggatgggggtgggaagatgggtggatgatggatggatggttggatggatggtggatgatggatggatggacggacggacggatggacggatggatggagtggatggagggatgagtggatgggtggataatggatggataggtggatgcatggtgggtagatggatggatggatggaatagatggatggagggatgagtggatgggtggatgatggatggatggatggatggatgatgcgtggatgggtggagggatggatgttggatggagggatgagtgaatgggtggagggatgagtggatggatggagagatgagcagaaggatggagggatgagtggatggatgatggatggatggatggacagataagtagatggatagatggatgagtggatggatgatgagcagatggttggagggatgagtggatggatggatggagggatggatggatggacagatgagtagatagatggatgagtggatggatagagggatggatggatgagtggatggatggaggaatgagtggatggatggagagatggatgatggagaagtggatggatggatgagtgagtggaaagatggatgggtggatggatgatagatggatgtccagatacttctgtgggcacttagtttgcaacaaccccattaaaaatcaggggaaagtggatcagttgaaagaaaagacaagaggagctggccatcaccaggggccttgtgagcagtgaggtctccttggtcagtgaccctggcatcgatgatggtctgggacaaaactagcttgttggccatgccctggtcactgtcgcagcagctggttccaggtggcttgggggccgcttgtcctcagaagcagcttagggacgtgcctcttggagtcagcacctggggataggagcttcctctccctgtctcttgaacactgtccagccttgttcaaggcagctctggccttggggaggccctgagtgttcccacatgctctctctggccatgtaaggcccctccctgggagcctgttgtcagcacaggcagaaccagtgtgttgctgttgggttggggctacccccaatcccgcagatgtgggatgtaccctcgctgtctgcctgctgggctgagcagtggccagcccagcattcctcagttagaggccctcctgcaggatctccgcagtaggtggggagggggcaggctgccttgtctcccaggtgttagagctctgatgtgggggttagccccgggtgggtgagtaggaggcccccatgaacccgagcctgtggaagccctcgggcagcaagtccttgcagtggtgctagaggggccagggccgggccagcgctgtgtctctccacagctggggctgcccaaagcagaactactccttcaatgactcgtcctccgagatcaactggtgagtccacactccagctcccaatagccaggcgctcagaggcctgggaccagggtggggtgggatgagtctccactccagctcccaatagccaggcgctcagaggcctgggaccagggtggggtgggatgagtctccactccagctcccagtagccaggcgctcagaggcctgggaccagggtggggtgggatggacagaggctcacactgcctggtccctgagggataatgcccagcctcaacccagcagccacccaggttccccaggacacatgtgcccttagccctggctgtggtcaatgctgggaatgtccccttcaagaggagcagtttgagaattgtgagttcccagccagttccacagcctccacacgctcttcctgagcccagtgagagatgcaaggaagcccgtctcccagtgaggtggcggcttctcttccagttcaccatcttacggcaaaggaaggcacctgccccgggcaggcagtgggaggtgactgcggggcaactggggtgcctggtccagagattaagacctgtccccagaacctgcaaggcatgtccccagtgcctgagcccctgtccgcatcaggcaaggagcagatggccccctgcagccatgcccctgcctgtttatggatgaggaactgagactcggggaaacccagggggctgtgggttagatagcccgacctccctgctcttagggacattcatgggagcccggcttcagggacccaggtgaaaaaaacaggctacccagtctggggcccaggctgctgttgcctgtcgtgtccagagaggagaagctttgccacccttggtagtgtcatgggctgcaggccaaggctccatggagactcagccatgggccctggcctcacaagcacctcctggggggcctgcctgctgcagtcctgctccatcctcctctcttggggaaccttcccttccctcctccttatggtcccctccaaaggcaaggtaggctcctttggtccagccccaatgagcagcacatgcttggggccagtggaggccaatggttatggccccagccccagggtggctgggggacactagtggctgtggtgccctactgtgctgcctcctttctcttcccagggctcctattctgtgggtggagagaaagatgacactgtgggcgatccaggtgagtgccctaccctgcccccctcccgactgcagtggtgctcagtaagcactgaggaccaacccagactcagtaagtagggaacccaggctcggtgagcactgaggacatacccagtctcagtaaatgctaagaacaaacccaggctcagtgagcactgaggacagacccaggctcagtaagcaggggacccaggctcagcaaatgctgaggacaaacccaggctcagtaaacaggtgactccaactcagtgagcactgaggacaaacccagcatttactgacccaggctcagtaaatgctgaggacaaacccaggatcagtaaacagggacccaggctcagtgagcactgagtacagacccaggcttagtaagtaggggacccaggctcggtgagcactggggacaaactcaggctcagtaggcaggggacccaggctcagtgagcactgaggacagacccaggctcagtaagcagggaaaccaggctcagtaaatgctgaggacaaacccaggctcagtaaatagggaaaccaggcccagtgaatgctgaggacaaaccaagactcagtaaacaggtgactcagggtcagtgagcacttaggacagacccagcatttactgactcaggctcagtaaatgctgaggacaaatccaggctcagtaaatgctgaggacaaacccaggctcagtgagcactgaggacagtcccaggctcagtaagcatgggacccaggctcagtgaatgccaaggacaaagccaggctcagtaaaacaggtgactcaggctcagtgggcactgaggacaaacccagcatttactgacccagggtcagtaaatgctgaggacaaacccaggatcagtaaacaggggacccaggctcagtgagcactgaggacagacccaggctcagtaagcagggaaaccagactttagtgaatgctgaagacagacaggctcagtaagtagggaacccaggctcagtgaatgctgaagacaaactcaggctcagtaagcaggggtcccaggttcagtgagtgctgaggaccgacccaggctctactgctctccacacaattttcccagggatccctgaggacttcctgaccccctctgtctgcttcaccacctgaatctctccctccactgacccatctgtgtccttgctgttttcctggggtggagagtgcacaggccaggtccctggctggctcctgggtgggtgacctagttcatgactgggtcccatgtctccatctgagaccagagagggtctttcacacccacccctatcatgttccagaggggtcagtagatgcctgtgctgagaggggttccgtgggggaaaaccaggtccactgagcctccatctccgttccctccccaccagggcagcgggatagccgctctctggtgtcttcctgagcgtcctgcctcacccactgcaccctccatcccaccctgggcctagagtgggcggcccaggaggaccatggtttcaagactccatctgccctcggccctggcgggggtcagccaaaggccttggtggctaagactgtcctgacatgggagtgagggtcaaggcagaccccagacacacacctggctttgtgtggtacctgcccgcgaggcctgtggggtcaggccccagccccagccccggcctgctccagagctccttccctttcctgactcccaggtcatcgtggccataataagcttcctggagacgatgcttctcatctacctcagctacaaagtgagtgcctgcccgggatggcacctcacagggggtccccaccctccccaccctccccagcctcccccacctcccccaccctctcctatttccccacacttcccagcctcatccactgacctccagggtgggctcctcgccctcttccccaccctgcccctcccctgctgggccccacccccaccctccatcgcccccgctgataccccccgtttggccccagggcaacatctgggagcagatcttccgcgtgtccttcgtcctggagatgatcaacactctgcccttcatcatcacggtgggtgagccccagctgccaggagtgcgggccctggagccccagccctgacctgtccccttcacagatcttctggccgccgctgcggaacctgttcatccccgtctttctgaactgctggctggccaagcacgcgctggaaaacatgattgtaagccggggcggggggtgcagctgggacttgggggggccaccctcagcctcaccggccctggaagacactgtgcgacgtagcctgccacgccccggccctggcatgacctgtagaggaccgggaagccagggcagcagaaactctgtctctgctcctggaaaacatccaagccaagccccgaatgccctccttccaggaagaaactcaatcccagagcttttcctaagcctggaaatgaaatggctggcaggaggaggagggacaaagtgaagggtgtgacaaacccaggccacgaggaccagggccacaaacaccaggccacacgcaaactggggccacggggccacaggcaggccctgtgctgagcatctcaggaaacctgggccacggggccacaggcaggccctgctctgagtgtctcaacatggtccctgtcatgtgaatggcagcagtcagttccctaggcgcccaccctctccaagccagaccccttgactcacagcccccattcctgccccagtggtaaatcagcgttaccatgctgggtccaagccttgcacactaaccagccctctgacctgagacttaagcctcatccccggggatgtaggcaagatggggacccgtcctgagagaggacagcagagggggtgccctacccaggtgcaggctgcccgtgggcctcagcggagacgcaggtgtggccaggcgtgggctgccccttgggcctcagccgagacacaggtgtggccgtgggctgccccgtgggcctcagccgagacacaggtgtggccaggtgcaggctgccccgtgggcctcagccgagacgcaggtgtggccaggtgcaggctgccccatgggcctcagccgagacacaggtgtggccaggtacaggctgccccgtgggcctcagccgagacgcaggtgtggccgggccgtctgctttccactgtccttctagtctctattcattggctcctggcggggtccacagtccctgcccgctgacagccaccactccttccacagaatgacttccaccgtgccatcctgcggacacagtcagccatgttcaaccaggtcctcatcctcttctgcaccctgctgtgcctcgttttcacggggtgagtgccggccgtcagtgtgagcaccccaggacgttgggagggcccgagaggcaagcagggccgggcgaggggatacagatgcctatgtccaagctatcggggcagaaaaggccacagtgcctgggctgcgggtgtcgggccaccaagctgggactgaggtcaggaggcagctccaagcccacgtccccagtacacgagcagccctgcagcccgactcctccaaggacagagatacccagatctggcttcctggtctatgccatggacgtagagaaggggactggcccctaggccaggtggggtctcttggctgaggcccagctgaaagcagggtctggaggcagccagggtaaaggtgggggtgcccagagctgcgagggcctccagcccacccaggcatgcccactgtgcccacctgcctgtgtcctcgtggagggctccatgttgctgctctgccttgggtcccagcgaggcctggtcaccacttcccgtccccaggcagggatgtcaggcaagcactgtgccctgggggagggagagtgccctgcgtttcccgcctcccttcccccctgcccctcatgacagactgacagacacagagctgagtgggcagattggggcatccatgaggatagcatctgggacctggcggcgaccccagccctgcccattagacctcccagcctcaggcctgggcgcttgtctggctgtgccgggcagaggcctgagtgtggtgggtaaaggggcaaggctctgagatgggggtagagggccagaccccaggcccacccctgtgtcacccaagcccacgctgatgacacagccctgcatcccctgctcccagagaatgttccagggacctaggagagagccacccggcaggcagggaggctccggggaattcgccgtgaacagaggccgccatgctgtggccaagctgcattgtcagccagcgtcaggcaggaggtggctccggcagagcttggggacagatgggcagggctgagggcctgatgccacccagctgtcaggagggcggggctcgcctggtgatgcacagctcagtctcctgggcagtgagggtcccgtgggcaggcaggatctctgaggggccacggccccccagctcctgggccccaggccgcccctcactgccaggggttgcaggacctgcggcatccagcacctggagcgggcgggcgagaacctgtccctcctgacctccttctacttctgcatcgtcaccttctccaccgtgggctacggtgacgtcacgcccaagatctggccatcgcagctgctggtggtcatcatgatctgcgtggccctcgtggtgctcccactgcaggtgggtcctctgggcaccagccctgggtggcaccagcaaagggacaggcgggtgccagtagagggagggtgccactgaggctgtggcacagtgcgggggccactcccaggaggggacagtgaggccaggcgggtggtgcctgctccgttgcacgcccccactgagggtctacggcgggtccggtggtgctcagcatggtgggtaatgatggagtcccgtgagctggcctcttccttctggggagatggtgggtctccagtgccagggtgacctgcccctcccaggcccaggcagagtgcagggaagggtcaaggtggacagccggcccatttcccatccacagccaggtgcagcagcagctgccaggcccacagggggcacacccccccggccaccccagtggcttccccgtcaccactgctgtggcccactgcccactgagcagaggaggggacggggcaagacctcagtgggaaaggtggaggcctggagagggcagctgcctcagggtgtgaagtgcttgggcctggactgcctccgacacctcctccaggcaccccagcccaccctggagggaccctgctattggggagatgggagaaggaggggacccctgtgggtggtggaacattttccaggaggctgggtaggaggaagagcctgaggaggtggccagggccttctgggagacagacccccaggtggctgcaggatgccggggagacagggcagtgctcctagggagcctctgctgaccccaggctcagccccagctccctcccgctaaacagcagtgggcgtggcccaggtatgggcccaggccaggcctggctcttctcctcactatatccaagccaaagctgtggcaccagctgtacggcccccagcgtgggccatgttctccacatctgtggcttctgttctcctgagttcagatggggccgtgcgcgtctttccatctggttgtcggccactccaccgtccagtgccacgagtcccgctcctgtgagctgcccgctcctctttggtcttccccctggttctcgctgatgagcgagtctctgtgttctagaagaagccagttgtgtgtggctttcccgttacttcctgctctgtgaccgcccctctcactttgcttacagaatcttccattcacggatggtcttgattttttttttttaaattagagatagggtctcactctcattttgttgcccaggctggcctcgaactcctgggctcaagcgatcctcccgcctcagccccagaaatagctgggattacaggcggcttggctttgattcaccaatctttcccttatggtttctgttttcctgtctttactgaaaagatcattccctccctcgatcataaacctggcttcctattttcttctaaaagtgtaaagctcgcctctcacctggagggtttcacccaccaggaaccaccatgtggggtggggtggagctgggttctcccctctgacgcctgctcccccacaccctgcattctgctcctttctctgcgcatttcataaccaggcaagggcgggagtgagggtgggagtgaggccaggagcacagtgtggggggcactccgtgcagtgacactgcctccctcctcggccctcctgccccaatccgtaaatctcacctcaaattctttaccttaattacttctgcaaagacccttttgcaaatgaggactcatcctgaggtgcagggggacctgctttcagggccatccttgaccttgctacgggcccccagcctccgtccctggtccgccccggcccacacttcaccacgtggccggcacctgctgaggccgctgcacccagatgctctgcagaggcgttgacccatccagtctctgaattccccacaagcccttccagagaaacatccgagaggcccctggcccagccgaggtcagaggaagggtcaacagggccaatgcgtccccctttcccctgtgggcccacggcccagccacacgcagctccaccttcgggctgcgtccggctcctctccccaccccacacaccccagagcgaagaggagccccagccccagccacccccagggtcgctttcaaataaagcaggagcgaagcgctctctcccgtgcttctcacgagaccgtggcacccacgggtaagggccaaatcgggatgtgcagcaggcctgttccatgtccctctgctgcgtccacagcctccgggccggggctgccttcccattctgctcctgaagcaccaggggagcccccacctccccttatctccattaagaagtaagacaaggccaggcgcagggctcatgcctgtaaccccagtactttgaaaggccaaggcgggaggatcgcttgagcccaggaatttgagatcagcttgagcaacgtagagagactcccatctctaccaaaaagtatgaaaattagctgggtgtggcggcatgcacctgtagtcccagctacttgggaggctgaggcaggagaatcgcctgagccctgaggttgaggctgtggtgagctgtgatctcgccatcgcactctagcctatgcaacagagagtgagaccctgtttcaaaaagaaaaagaaaaaagggccaggcacaatgggtcctgcctgtaatcccagcactttggagggccgaggtgggtagatcacttgagatccggcgttcaagaccagcctgggaaacatggcaaaaccccgtctctaccaaaaaataggaaaaattagccaggcatgatggcacacagctgtagtcccagctcctcgggaggctgaggtgggaggatcacttaagcccaggaggcagaggttacagtgagccaagatcacaccactgcactccagcctgggtgacagagcgagatgccatctcaacaccatcttaaaacaaacaagacaaggtgactccaggtgcaccaggtcctgcaggcatcacacctgcactgctcttcagggaaattcacggaacaaatgcgccatcgtcacgagaactgattgcatcgatgggtatggccatggtgacaagtgaccgacagcccagcagcctgcacgcagaggtgtcactgtagctcgagctccgtgtccacagtggggtccctcagatcagccactgcctgactgccttgtctcctttctcccgtgtggggcaggcagagcaggccctgagtgggacaagctctgagcgaggcagggaggaaggcgggggcagggcctgggggctggcgcaccctccctcccatcagccctgccggacctggtgctcaaacctgacccaggtgggcctgtgctgtccctggcagggctgggggtgattgggacagtgatgccgctgaccccaccgtctaagccgctccctgcctcctccgaatgactggaaagactgagcctctcactggcgatggtaagggtgggctgcagtgcccttgcccttggtctccactgggctgaatgcaccagtaaaagcccttgaagcagagtgatgaccccgaggccctcgctcacgagcgtccttctggaacacagcagcgccggctgggtctcctggaagtatcctccaggctcttcgatcagcaagacagacaggcagcttaaacagcagatatgtatcctccgccagccctggaggacagaatcggaagtggaggggttggcagggctgaccctatcaggccgctttgggggagattgtcccatgcctctctccagcttctggtggggccgcaatccctggggctgcttctacggtggctgtagaaacctcagcctctgccccgtgtgcacttggcctcttctctgtacctctcactggatttagggcccactccaacccagggtgaccttatcttaaatcattacatctgcagagacctatttccaatcagatcacatggcgaggttctgggcagataggacttttagggtcactacggagctgccgtcattagctccttcatcctcacggcggccctggagggttgccgtgccatgcagccatcttgtaggtgaggaagctgaggctcagagtgggggacgtgagccctggggtgtctgacagcagagcccccgccagcaccatccgcggggaagcctctgttccggtcgccctggagtcttgagcacctcccagctgtggaaactgttttgtgtggcaaggcagtggagcctcgtcaccggaacaaagcaggcgctggataagtgcaatgcgatggtcccatttagaccagacgatagcacatcagccatgcagcccacagtccatgggagctcctgccattgttcatttaacacgtgttcaacaagccgggcaccatgactcagcctgtaatcccagcacttcaggacgacaaggcaggaggatcgcttgagcccaggagttcgagaccagcctgggcaatgtagtgagaccccatctctacaaaaaataaaaataaaactagctggtcatggtggtgatgcacctagaatcccagctactcaggaggttgaggcaggaggatggcttgagcccgggaagtcaaggctgcagtgagctgtgattgcaccacggcactccagcctgggtgacagagtgagcctccgtctcaaaaaaaagaaaagccaaagactttcacctagaggccagtggggccggtgctgggaggccccggtggcctctgttttggatctgtcccctttgagtctcaacacccagagcttgcatctggggagcatgagccagggcaggcagcatcctcagaccagcagcctcaaaccacctgccccccagacataggctcctgacagtgaggcctgcgagtgcctggaagaccggggtctgaggcctgatttggccacgcttaccatcaagagagtgatccccaatcccacgggctgagcctccccaccctcggtttactccacagtctccagccgcccctcctcccttggtccccacacatcctgccagccgggcctgcgtcctgctctgtgtcatctgaggctatcagcatctacagtttccatgtgggaaaggcccccctaatgtaggtgtcaccccccggccggccctgccccaggcccctaacagacagtcgtgtgtcagggcccaggttcttcaccgggagccctcgctccccaggcctggtcgctggtgctcacctgtttctcacctgcagttcgaggagctcgtctacctctggatggagcggcagaagtcagggggcaactacagccgccaccgtgcgcagacggagaagcacgtggtcctgtgtgtcagctccctcaagatcgaccttctcatggacttcctgaacgagttctacgcccacccccggctccaggtgaggccccttaccgtggcccagcagacgactccctcccggcccctagagacgccatcctctccccaggactgcttggcaagtccctgagtcctctcagccttggtttaccccttcagtgagggcagatgcctccctcccggcgcccagagacgccatcctctccccaggactgccatcctctccccaggactgcttggcaagtccctgagtcctctcagcctcagtttaccccttcagtgagggtggcagcccacagtcaggtggaggggccctgcgggggcccctcttttccctcccaccagatgcaagatcacagtgagctctagggcccagaggtggtgggcacaaacacagtcctgaaggcagggccgcccgggcggggcaggggctggctcagagggtctgaccctccgcctggccggcaggactattacgtggtcatcctgtgccccacggagatggatgtccaggtgcgcagagtcctgcagatccctctgtggtcccagcgggtcatctacctccagggctctgcactcaaagaccaggacctcatgcgagccaagtgagtgctggtgggcggagggggtggcatgggggcaccttcctgagtcaggtcggctgctcagggctgaggcattgaccgtcgctctcctggccaatgagagccatgagagcattatagactatccccagggtggaccatctaggtggactgtccagggtggatcgtccggggtggaccatttagggtggatcgtctggggtggaccattcagggtggaccttctgggatggaccatttaggtggaccatacagggtggatcatctggagtgaactgtcaagggtggaccatccagggtggaccatctggggtggaccatctaggatggactgtctggggtggaccattcagggtagaccttctgggatggaccatttagtgtggaccatccagggtggattgtctagggtgggtcatctggggtgaactgtccaggggggaccatccagggtgggtcatctgggatggactgttcagggtggaccatccagtgtagatcatgtggggtggaccatctagggtagactgtccagggtggaccatctggggtgggctgtctggggtgggccattcagagtgaaccatctgggatggatctctagggtggaccatccagggtggatcatctggggtggaccattcaaggtggaccatctagggtggaccatctggggttggtcctctggggtagatcatcaggggcggaccgtctggggtataccctctggggttgtctggggtgggccatccatggtggaccctcttgggtggaccatctggggtggatcgtctggggtggaccatccatggtggaccctcttgggtggaccgtctggggtggatcatccagggtggactgtctggggtggaccctctggggtggattgtctggggtagactgtccggggcctcttgcagtttctctagctcaggtcccaggcccagatgagcaggaccctgcagccaggcccttgtccctgcaccatacccactgtggagcagcccaggcaagcccaacccagctaagtctctgtctcccttttcagggtgaggggcagccttttgcgagctccaccttcccctgctccaagtctagggaaatctttgtcaagttctagggaggctcaaaatagaacaggggcgggagagtcagctgctgtgagtcaaggtgggagaacgggctgaaggtagagttccttttaaagacaaattgacagagtgacaaggtaacaagagtatattattacctggaactttccagaatgtgtcggtgcactttctgggacactccctggaaaaccctcctggtgacattttcattccaggagcctgaatgtgtccttagtggcatagtgttggtggtactcccagggtctctcctcatcactccccctccccctgccatgtccagagccccaagctggaacccattgcctatggaacgccacctcttttgtggtcccgtccccagcacacacaggcgatgcacctgcttgggcccagggagtggggagagggcaagggcgtaggccattcccagccaggcagggatgagcccagggctgtgggtacagggcctggggcccctgcggagcagacagtggtgccagtgatgtggtggggttccctgccctggggcagaggcgacagtttcttagacagcgtctcagcagtgctaggtggtttctgcagctgggctttcaggagacccaggaggcgctggaagtgaccacccaggttcccagaccacagagtagccaggccagggagcggacagggtctctgcccccagattcccccctccctcctgcaccccaacccagccctgggtgaatgtctcatggcaacatacaagatgggtaccccggaagccagtgcccaggtcactggcacacacctaggtggggtctccaccgggcctgctcctgccaaccctggacccctagcccctgacgcctgggagtatggacaaatccaggcagccccagccagcagagccccctcgcacgacctcctgatgcccctcctacctggccaacttagggacaagctggggggttgcttcagagaacagggcctgggggaggaagggcaggcactgccctaggaagcaccatgggctcccactcagggccgtggccaggagaagctgtcagctggtgtctccaggacacaccatccatagcatctgaccccctgcccccacccgctgtcagcctgcacacactcgggggacaggtgtggctcctgacccctgcccccacccgctgtcagcctgcacacgctcaggggacaggtgtggctcctgaaccctgcccccaccctctgtcagcctgcacacgctcgggggacaggtgtggctcctgtgccttctcgagtgtcggagcttggagtctcctagggtgtccaggagtcctgacccggctcagagcctgccagggatgggccagggagtctggagaggcccaggatgcctgcgggggggggggggggggcactgggataccggtggggggggcacagggatgcctgctggtggagggcacacaaggatgcccgtgggggacactgtgatgtgggttggggggggggggggcagtatggggatgcccactgagggggcactgtgactcctgaccagcagagagtaggggcctcctcccgccttccatcctccccgccttccatcctctccgccttccatccagccgtcctctcagtctctttctgtgcacctgctgcaccagcctcctcccagaggaggtcctccccacctcacctccgcacccccggctgcactgcccacctcccctgctccacccacgctcaggccctggtgcattgcaggatggacaatggggaggcctgcttcatcctcagcagcaggaacgaggtggaccgcacggctgcagtgagtgaggctgaggccctgcccaggcgggaggggcaccgtggggccggggagcgggggtccctgagggaagagacctgccccaggctgccggtgccgcccagcagcccacagaggccagcccgtctgcactgaccaaccacccaccccgccaggaccaccagaccatcctgcgcgcctgggccgtgaaggacttcgcccccaactgccccctctacgtccagatcctcaaacctgaaaacaagtttcacgtcaagtttgctggtgcgtctggggcacacgtgggtgatggtgtatctggggcagggcacgtgtgcacacgtgggtgatggtgcatctggggcagggcgcatgtgcacatgtgtgacggtgcgtctggggcaggacgcgtgtgcacacgtgggtgacggtgcgtctggggcaggatgcgtgtgcacacgtgggtgtcggtgcgtctggggcagggcgcatgtgcacacgtgggtgacggtgcgtctggggcagggcgcgtgtgcacacgtgggtgacagtgcatctggggcagggcacgtgtgcacgtgtgtgtcggtgtgtctggggcagggcgcgtgtgcatgctgttgggtgatggtgcgtctggggcagggcgcgtgtgcacacgtgggtgacggtgtgtctggggcagggcgcatgtgcacgcagttaggcgagctgtgtggggcagcgggaggggctggccctggagctcctcacacaagcacaccaggaggtgctggaggggacggcagacccccatcctcaccgcatccgagaagggacctagggggtccaaactcttcagatgaagtcttatgctgggatcctggggtcagtgaaggcagggtcagaggtcaggtgggggcaggagcaccgtctgatgagcacctctatgggcagggaccatgccgggtgcccggggaacggggggcaggccccatgccaggtgcccaggggacaggggtcagggcccacatggagtgcccaaggcacaggggccagggcctgccccgccctggaactcctcgctgagctgggagagaagcacaggagcgatggaaggtccaccgaggctcagaccaagtagggggttgaggtccacagactctcggggcagagatgctgaagccggacagcagacacgggggtgccaggcaagggtgcatctgcatagcaccttcaggaagtgagcaggtactgtgggggaggagagagccggcagagcggcaggtggaccggcctcccccactgcccgcagaccacgtggtgtgtgaggaggagtgcaagtacgccatgctggcgctgaactgcatctgcccggcgacctccaccctcatcaccctgctggtgcacacgtcccgcggccagtgagtgccccgtgccccgggggaccgacctccatggcggggccggcgcagggagacaacgcagggcctgcttgggggcggggatgggcttcccagaggaggggcacatggcgggcaaaagtcctgcatagggaggggatccatgccaggggaagcagaggggggcacctgcagacccagccggggagaaggggcagccatggccgagggtgacgctcccctggccccgccctggcccacagggagggacaggagtctccggagcagtggcagcgcatgtatgggcgctgctccggcaacgaggtgtaccacatccgcatgggtgacagcaagttcttccgcgagtacgagggcaagagcttcacctacgcggccttccacgcccacaagaagtaaggccgggctgcatccacagggctggcgctccagggctgctctgctctgtgccctccccaccctcccggtcaggcacaggggtggccctggggcggggctgcagagggctcgggggagggcatcaggtcatcctgcctggcgagggcagccgcaggactgggctccgggtccacataaaaacctgccacgcggctcctccctgaggcttgtgggctgaccccagctctctggtccccaacacctctgggacgggagggctcagccaaggtccctgaccccaaatggcccccaggaggaagacgcggagctccggtggggactctggtgatttgcaggaagggcaggcagggagcgggacagggcgggtgagcggcggtacctgaagttgccggtgcctctgcccaggtatggcgtgtgcctcatcgggctgaagcgggaggacaacaagagcatcctgctgaacccggggccccggcacatcctggccgcctctgacacctgcttctacatcaacatcaccaaggaggagaactcggccttcatcttcaagcaggaggagaagcggaagaagagggccttctcggggcaggggctgcacgagggtccggcccgcctgcccgtgcacagcatcatcgcctccatgggtgagccgggacaggcgcgcgggactccctgggcctgctcctttggcgggagaccaggcgggacaccggcaggtgaccaggtgggatgggagaccaggcaggacagggggaggtgaccaggtgggacaggagaccaggcaggacaggggcaggtgaccaggtgggacgggagaccaggcagggcgggagaccaggtgggacaggagaccagaccgggcagggcaggagaccaggccaatgtggcccccagacccagttcctcttggcctatgcctccaaccttggacaggtggagtctctctgggcctgtttttgaatctgtcaaacaggtgtccccgccttcctgtggccacctttgtgggcattgctcactgtgtccaagtgcctgtccaagtggggccgcccacaggaccggttggcagctcaaccggaggctcctggtggtcccatcagcccggagggtctgcttcacgtgtgtccctcaaacagtcgggagtcctgacgtccactggggccaggagttggcggaatgaggtcgcagtggccgagggctttggcctcttctcgtgccttcagggatcctcccggggagccgcttaccagacagggtcaggctgcctctgagcaggtggaggcccatggcccctagggcaccacccatagtggtgttgccccctccccagccaggccttcctgggggacagttagggagcagggccaggccaggaagccactcaggccacagacccacagccgggccagcatgttgccacctccgtacagtggcccaggcagaggctgaccctatggggcaccccagcacgcccaccctggggtgttgttacacggtggctgctggggcaccaggtggttcagtgcagtggggcacagtctccaagacccagagggccctggggtttggagacgtgccgatgcggagcccaccacctgccagaccccgcaggttcccggccgccgtctacggcagctcactcggggggccgggcctggccgcagggcactggggaggcaggctgctgctgcctagccacacctccaccttcacctgcgcagtaggcactctgcccccaggtggcttccaggaaaccagggtgactcgggcaaccctcactgtacccacagaggccctgggccatacctagaggtccacaacccccatctggcagcctggggtggtgcaggagtggcagagtctgctcccacaggcactgagtcacccagctgctccccacctggccccatccaccaggcagcctgaccagctgcacaggcccctaaggctgagacccccgagcccagaatcagccaaccccctcctcaggcatctggtgctgaggccacagcagctggcctgggtggcaccgatggggcactggggccccctgggtcttcgctcaacatcatcgccaccccagaggccactgtccctgttgtatggagggggaaactgaggcatagattgaagctcctcagctggagcacaggagccaggccatgacagggtctccagagctgactgtgttcacctgagctctgggaactcgccgcccatggagggtgggagtcgggctgtggccaagcacagggctctcttccagggacagtggccatggacctgcagggcacagagcaccggcctacgcagagcggcggtgggggcgggggcagcaagctggcactgcccacggagaacggctcgggcagccggcggcccagcatcgcgcccgtcctggaactggccgacagctcagccctgctgccctgcgacctgctgagcgaccagtcggaggatgaggtgacgccgtcggacgacgaggggctctccgtggtagagtgagtgctgccttggagacggctcccagtggggggaggagccgcccatgagtgcgggggatgggtgtcggagcatccttggtggtcccccatgctctgaattgcagcttctggacagctccgtggaagtccttgtttgacaaatgaaatcttcagggggcccaacacagacatcagggccacatcaccctcgtcgccggggagcacttttgagtgtcactgagatggggtgtgctgggctacaccctttccagttggggctgggggtgcagagctaattggagcgaggcagctcactggcacaggggctgtcaggcaccaggcagcgccaccctcagagaggggcccgttcccacccacctcaccagccccatagtggcccggccactctctgaatcaggatggagctgggcagtgaccccaggccatcctccacccagtgccctaggtctcccccttagcactacagagcacagaggggcacagcccgcctgaccaggggtgggtgtcctctgagcagggtccctgtgcaacccctgggcaaggcagtgtcccagcctggaaaccacagcccgtcctgagttgttgtcctggcctaggtttggggccaagtcctcctgcttcaaatcatgagacaggaggccccactctgttctcagcagcttctgccttttggcctcagccaggacagacaagtgccccagctgcagggcccgaggtccatcctcagcggggctgcctcactctgtcctggcctttgcctctggggtggggtcaacacactgtaatgacagcccagctgctgggaaacagccctgaaccattgcatgtgtgtgttgggtgctgctggggacggggtggtggcctgctggggacaacagcctggctggacaagtatgtgggtaagagcccaaggccagagtgcctgccccaccagccgggggtgctggggatgtcagggaggcatggcgggcgggcagagccctgtgggttttgcatgtggctgaaaagcctggtctaggctgtggtgggaggagaaagaccgagtagggcatgggggtgggtgtgcaaggggggtgtgtccggtgtgtgtgtgtggtgtatgttatgtgtgtggtgtgtgtccatatgtgtaatgtgtgttgtgtgtcaacgtgtgtttgtcacgtgtggtgtgtgttgtgtgatatgtgatgtgtgtctgggtgtgtgtggtatgtgtccgtgtgtgtgatgtgtgtctgagtggtattgtgtgtggtatgtggtgtctgtgtgttgtgtgtggtgtgtgtccgtgtgtggtgtgtgtggtgtctgttgtgtgtgtggtgtgttgtgtgtggtgtgtgtgtctgtgtgctgtgtgttgtgtgtctgggtgtgttgtgtgtccgtgtgtggtgcgtgttgtgtctgtgtgtggtgtgtgttgcgtatgttgtgtgtccgtgtgtgtgtggtgtgtgtctgtgtgttgtgtggtgtgtctgtggtgtgtctgtgtgttgtgtgtccgtgtgtggtacgtgttgtgtctgtgtggtgtgtgttgcatatgttgtgtgtctgtgtgtgctgtgtgtctgtgtagtgtgttgtgtggtctgtgtggtgtgtctgtgtgttgtgtgtccatgtgtggtacgtgttgtgtgttgtgtatgttgtgtgtcgatgtgtgtgttgtgtgtctgggtgtgtggtgtgtatgttatgtgtccgtgcacgtggtgcacgtgtgcatacgcctgcatgtgttcatttctgtgcgcatgtgttgtgtgtgtgtccgggtgtgtccatttccgtgtgcctgtatggggccatgtgttatgccgagggctgaccatgggggggtcctgggctgaccaggtgaggggtgagccccaccgccacccccttccacacctgggtgagggcagcagcagtgagggccctacccacccctcggtctcctccagtcccccaaggccctgatggggctaagtccatgcctccccagccctggccttgcagccgctgctgacccgccaggcaggcacgggtccttaaggttcggcacctgcatgggtgccctgggcactgccctgactgccctgcaggacacactgggtcctgggtgccaaggctaggcaggccctatgacacggtgaccacaggctcagctggaggagcgtttgctgatgcacaggtggttaagggaagaacgggccaccttgggtcagctgtgcgtgaccccgagcaacgtggctgtgggtggagtgggtgccctcgagtcccccagcccgaggggggccccagagcagacccagccacctctgtgcagctgtgctgagggctcctgtctcctgccccaggtatgtgaagggctaccctcccaactcgccctacatcggcagctccccaaccctgtgccacctcctgcctgtgaaagcccccttctgctgcctgcggctggacaaggtaaggctggcggctctgccgcgctctgcacccccagacgccagcaccgggccgtgcatacctgccctggtttctctttggtcactttacatttcgataccattgcaaacttctagcacagctgcaagaattctgcaagggagagccacagatccttcacccagattcagcagacggtcccttcctgtcccgtttgggctctccctctcacagtgtctatgttagaggcacctgttttctgagccatcttgagaacaggttggagccaccacacccctttcccctaatacatctacatgcgttcccaaagatcaagaaccatctcgtaactacagctcattaggacagggaccccggcccggcatgggtgtctgatccacagtccaagttcagattgggccgagggccccgaaggccttcagcgtcctgcgtggcagtgttttccccaccgggagcctgtcccggctgcgtcttagcaactcctttctcgttactctcccttaatctggaatgttccctggggtctcttgaccttaatatttttgcagagcagggaccagtgacctggtggcaggtgggtctgcgatgtttcttggtggtgggactctgcctgcatgtggggccagccctccctggaaactcgggggtcaattgtcaggtcactggcgatgtttacttggatctcatggcaagctggggtcagtagggtttccccactgtgaaaatgactgttttccttctggagttagcagcttctctgtgggggacgtgttgagatcaggaaagcaaaccactcgacccagcggcttcaacatccctcagtgggttcttttttgtttatttgttgtttggttttttttaagacggggtcccactctgtcatccaggctggagtgcagtggtgggatcatagctcactacagcctccacctcccaggctcaaggggtcctcccacctcagcctcccaagtggctgggaacacaggcacgcaccaccacacctggctaattttatttatttatttattttttgtagtgatggggtctcactatgttgcccaggctagtctcgaactcctggactcaagtgatcctcccacctcggcctcccaaagtgctggggttacaggcgtgagccaccatgcctgccatctgtggatggtttccagttccggaatctctctccagctgtgtgttagggctcggccacggaggggacctccccttccccatgtgtgtgtgtccttcacggaccacaggctcccagcatattctgtgggttataatctgtggccggtcattgcagtagcatcatccttgacagatcgttattgattctgatgctcggaccccctcagttcactgggtggggtgggggccttcaagcggcttctgggtgcttctgacacgatcccctcaccctttgagctcatctgtgctttccaaccggagatgttccagccacatcttggccttcgcctgctccagtctggaatgaaccacttctccaaggaaccctgattccttttagtggaaaatgatgattggaaaccaagacctgggcacgtggcgtgctcactgctgttggcatccctgctctgagaaaacgtgtgtgcatacacatgacacgtatctatgcccacacctagatctctagccacatgccaaaaccacatgttcacatggacaccgccctttccacccctgacatgactgctctgtgccgcctgtgggtacagctgtggcatctggtggtgcctgtagctccccacaggcgtgtgcaggccgtgaaagggctgtgggccgagaggctaacggctgggtgttcacgggggatgtttggtgaggggtctgggagggctccagtggccagcaggaaccacagccctgactccagccctgactccagcatctgcccccagggctgcaagcacaacagctatgaagacgccaaggcctacgggttcaagaacaagctgatcatcgtctcggcagagacggccggcaatgggctgtacaacttcatcgtgccactgcgggcctactacagatcccgcaaggagctgaaccccatcgtgctgctgctggacaacaagtgaggctcctggggctcagcccaccccgcccacccgggccctcagacctgcagccagcagcctccccaactgggcccacccttcgcctttgcagagggcacgggaacatggggcctctggcctggtcctctcagctttcctaaaaagggggactctccttcctgctcccaactcctcctgctcccagctcctccccacacccactcctgctcccagctcctccccacccccagctcctctggctcctgggtcctccctgctccctgttcccccagttcccagctccacccaactcccagctcctccttgcttccagctcccccagttcccagctactctccattcccagctcctccccactcccagcttctccccactcccagttccccctcactcccagctcctccctgctcccagttcctctggccaccagctcctccccactcccagttcctctgtctcccagctcctccatgctctcagctcctgtggctcccagctcctcccactctggtcctctctccccctttccccctcctcccttgtcactccttctgtcctgtttgcctcctgctccactcactctgagccccaggattggggtggagggataaatggctcttcctcctgggcacctttttgcccaggggaccctaggaccctgacagctgagcccagggtcatcttggctgtgtgacctcagcaggtcccaccctcccgggccttggtttccccttgaataaaataaagaatggcccactggccttaaagtactccccaggtcccatacgctgcggttctggggaacccctgcctggcccagctctgtgcatggagggtagggccccactgggcctgaggagggcaggccttgaagcagggtgggcccctccaggaccgctgtccccacaggcccgaccaccacttcctggaagccatctgctgcttccccatggtctactacatggagggctctgtggacaagtaaggcgtggccggccgaggctcgtgggggctccacacccacccctcccctcctcttccaaagtctggggtgaccccgaccgcaggtggggtggggggctgaggtcctcctgccttctgaccaaatcccggggtcctgtgggtggggagtgggccgcatcctcagccacgggccctcggtcccgccaccagcctggacagcctgctgcagtgtggcatcatctatgcggacaacctggtggtggtggacaaggagagcaccatgagcgccgaggaggactacatggcggacgccaagaccatcgtcaacgtgcagaccatgttccggtgcgtccagtgtccggggctcggctctaaaccaccccacagccacgaccacgggccctcgccctgagacccccacagccacgaccacgggccctcgccctgagacccccacagccacgaccacgggccctcgccctgagaccgccacagccacgaccacgggccctcgccctgagacccccacagctatgaccacaagcccccaccctgaaacccccacaaccacagccatgggaccacaccctgagacccccacagccatggactctgcccagagacccccacagccacgaccacaagccctccaccctgagagtcccacagccatgaccatgggcctctgccctgagaccccccacagccgtgggaccctgccctgagacccccatagccaagacagtgggccctgccctgagacccccccacagccatgggaccccgccctgagacccccacagccacatgatcatgggcccccaccctgagacctcctacaaccaccatgggccccgccctgagccgcctgcctcccccaggctcttccccagcctcagcatcaccacggagctcacccacccttccaacatgcgcttcatgcagttccgcgccaaggacagctactctctggctctttccaaactagaaaaggtgagcagccctgccccgtgccagctgccaccccagaatcccagaaagagtgggagaaaggggctcaggggaaagggggccagtgccatgggaggctgggctcctgccgccctcctgctggggaactcaggagatggcgtggggggcccagcatggacagggtgctcttgatggtggaaccaggagatggaggcagggcgtttccctgaccgcgtgtgaggcactgggaatgtggcccatagcagccttccatctccctgagcagggaccaggcctggccgtatctggaggccaaggccatctgtcctggcatggtcagttggtcagaactcccgtggggagccctcagatcggtggttccacataggttggccagtagctcttagtacagataacgcacacggctgcaccattccagacttctccgctgccctggccactacgcccgaccttgaaacaggttcagtataaccactgcctccttgtattgacaagggacggagggcctgagagggaaggggcctgccccggatcgcacagtggagcaagtggctgagctggaattggctttctgcccttggagctccatgaagggcaccacccagggtcaggtgtggaacccaggggcacgggcactgttgctgttgccttgatatctggctgaccccagccccaccgcattccccacctgctcaagctgggacagcaccaccttgtccacacgggggctggtgcccaggcagccctaggctgagagcagggagcaggcaccttggtcagcagcaatgctgtctgctctacacgaaccccgagctcaccggtctgggctgaagtcctcatcggcgagctgctgggacctgcgtggctgcaggattgtgacaccgtggaggatctactgagccaggcccggcctggccaccaacaccaggcagaggacacacacgggcactccctgcgacacggacatggctttgtcccacctgaacccgatggagagtgaaagtgtgttccggccagccgtggaccaagagcccatagggatcctggagtcagttctgccccagagaagcgagaggaggccgggctgggcagccaccaggtcaacaggggcttctgccttagagatgccagcctgaggcgtagggggatgctcgggcacctggtctcagcacaggagagggctctgtctgccctgcccgccgcccaagcccaccctggagcctgccctgcccagcgtcgggagctcctggccccagtccccggctcagccggcagaggggtgtgctctgcagctggaaccacggaaggggaggaagttcacaggattctgtgttcgggtgccgggccgctccccagggctgggaggactctccggatctggaagaccaagtctgaccctgtgtggacagggatgctgccgtggagtcggggtcgaggcagtcatcctggcgcggctcctccggcctcagccttgcacctctctgtcccacaaggtggcttgaagtttgggtcagcaagcacgcagccaacacgctcctgcccgccttcccgccaggcagccatcgccaatcacccacgctccgccccgccgtggggcccatctctttccccggcttcacctccactggggctctgtgttgccggggcgggtgcggccagctctccatctcagagcagtgaacagtcctgggctccagctccagtcatgcgattccgtggcagttgtgtgacagggaccaaggagaaatcaggacatcggcaaagcctctggaagcagccgtgagctcctctgggctgacatggtgctggggtccatgtgggacagatgccctgggccctgggcagggccaggcatatacagagacgtggagccgagggaggagagggtgccgtggaccacctgacccatcaccctctgcagaggctgggatccgcctccccagcatgcaaggagcctgtagaaggcaccaggggctgcgtcttctccagcctgggtggccttggccccagatcccccatgggtctctctgacgggccagcatacggtgacctgcttccaacaaggacacctgtggcagcttcagatccttatttaaaagacattaatgccaatttattataaaaatgtacatgtttagtatgtattttacttcaaagaatactgaaagtaaaaaaaaaaaaaaattgaagaaaagttaccccaaatccctgcagccaacatcttctacatccaggcccagtggaaggataaagacaggattccaggcacgactccggaaggaaaaagggaggaggtggagatggcatacacgaccgtcagtgagatgctctgccaggtgcagcggctcatgcctgtaatcccagcacttttagaggctgaagcaggaagatcgcttgaggccagaagttcgagaccagcccaggcaacatagcaagtccccatctatacaaaaaatttaatggctgggggcggtggctcatgcctgtaatcccagcactttgggaggctaaggcggacggatcacctgaggtcaggagttcgagaccaggctggccaacatggagaaacctctctactaaagacacaaaaattagccgggcgtggtggctgtaaccccagctacttgggaggctagggcaggagaattgtttgaacccgggatgcagaggttgcagtgagccgagattgtgccactgcactccaggctgggcgacagagcgagaccctgtctcaaaaaaaaccaagcaaaaaaatgaaactattattaaggatgctgctggtggggtgacatgcatctccccttgagggctggctccagaaggctctcagagccccggtgtgtgagaggagtctctcccctgaggcccacctcccctgccgtccacctcccctggtctccagcacccaggactcctccaccacttcattgctttcacatggtcagcctgtgtgatctctcctcctcaccaggagccttccttcaggctggctctgcccatcctggggctgcacggtgcctgtcctgctccctctgaccgggggtctcgtgctcaggaagggctcatccgctcctgtgtgctcctgtcttcactgtcacttgtgaatggcacccgctcagcccctgctgaagccctcctgtccagaaagcaggaggaaatctctggaaggtcctgaaacgtccagctttttctttccttccacgtctctctctggccctgtcgtggttcttgtttcctgtttagcgttgttctgagtaaaggaaaattaaaattgcaagttgttctggaatttcacgttcgtctccgcgaagtacggctggaattctggatgcaaatcaccacgattgcaaactcacacgcccatcgcagctcatcgcacctggttcttgccccaagagcggaaacgccgcacgaaactaattccactgtttctcacgccccagccttcccaccggccactgatgagtaagggcgaacccggaggaaaaggggcttctgcctgcttgtcctgtcgctgtcgtgtcttttacctgtgaatcgagttctggttccggggggaagtgtggcctccgtgggcgcacacgcctgcctgtgcacacttgcttggaggccgagctccagggttggggccctccgctgaagaatgacccgagagttggccacggccgggtccggagcccgtggatgtaccgcctcacgtgacagaagggcctctgcagatgggattaagtcacgggcctcgagatgggagatcctcctggagcatccggcaggttcacgccgtcagggtccttctagggagaggccagaggtccccatccggtgggaagaagctgcacggccagctcagaagagggaagagggagccacaagccaaggcaggtggcctccaggagctggaaaaggcaagagaaggaggcccccaggcctccagagggagcggggccctgcccaggcctggatccagcctgagacacctcaaactcccgactccagaaacgggagagaggagacaggtgtcgttttagctgctaagtttgcggtcatttgttacgggagccccaggaaactcagtgggtccattgcaagcctggagcacagggacggggaggccaaggacagcagggagcccgatgcttgctcctcctcagcccagactccacacgccctccggcaccacttacaaaacaccgggggaggagaggattatcaggaggatttggaatttcgggatggcaagagcagggcgcttgaccaagcgcagtgcccatggcagccgccgggagtccaccttctcatcagagccccacatcactcctcccgggctctggccctgagtgtgtctgggaagatagagctggttcaggcctgccggtgtatgcacacatgcagacacacactgtgtacacgtggacacacacaccatgcacaaatgtgcacacaggtatcatgcacacatgtacggtgcacacacagtgccctcgaccccgtggctgccgtgccactggagggacctcggcaccagcccatctgaggcccctcctttcccacagagggagcgagagaatggctccaacctggccttcatgttccgcctgccgttcgccgccggccgcgtcttcagcatcagcatgttggacacactgctctaccaggtcagcggggaagcggcagcaggagggtggcgcctgggtgggacccccgtcatgccctcagctcttcagcctggtccctgttctgaatgataggactccctctgaatgaccttccctggattccaaggagacctctgggccctgtccttgccccagggatttctgggccctttttgacctatgggtgcctggcaagggagttttcttagaaaaggcctcccagaactctgcctgtgggtcatgtggtgcttggggacctggtggttctgtgtgtgtgtatgcatgaggggtggcgagcccgtggccggtggggtatggacctgtgtcccacgcccgtgcccgcgtgcctcactgtggctccctccctccctccctccctccctccctccctccctccctccctggccagtccttcgtgaaggactacatgatcaccatcacccggctgctgctgggcctggacaccacgccgggctcggggtacctctgtgccgtaagtgcccctggctgcgctgggctgggggcgtgctgggctgtccaagtgggtggatgggcacctgcccctgattcacggtggccaggaggctctgggtgctgccacctgccccagccaactcagggttcccaccctgcagatgaaaatcaccgagggcgacctgtggatccgcacgtacggccgcctcttccagaagctctgctcctccagcgccgagatccccattggcatctaccggacagagagccacgtcttctccacctcggaggttctggggcagcctgggggctgggactgtggcagcccctgtcctgtgtgacccacagcatccccaccttccgggggctgggactgtggcagcccctgtcctgtgtgacccacagcatccccaccttcagtgtcagggacctgggctagatcagctttgctattgctggcagctccttccgtctggtccgtgtgcccacgtgtagcgcttccagctggagcagccatgacccctaccgggggcagagaggctcaggggagtcttcaggaagaatacgggcagcccctgtgctgcagtccacacagcagcaggcaccgtgcccaccagccctaagcatgttccgtgcagaccccaggctgaggcggcgtggggggcaggggtgcgcccacaggtcccagactgcgcctgtttcctttgcagccccacgacctcagagcccaggtaagcaacccctccgtgcccacgcagcttctgcggagcaccagaacatcgcagcttcacatggagaagcctgccaggccccacccacccacccacccacagggccctgggaaagccgaggcaggagcgggtcccacggatgtgtcggccccagcacggctcagagaaggctgttgacactcactccctcctgcactggtggtggggaagctgaggcctggggggagtagcctgtgagtttggacaccaggtgcacccccgccccctcccaggccccaccaaggcaggcagcccccatgcccatctggcctgaccagcccccagcctcccaggcctttctgaaggtgccacccaggtgggatgcctacctcttcccagcaccccacgacccacaggctctggcaccccacgttccccaggttcggggcctccaaagggtgtgtttgcaagagggatcagggctcatctgcagatggagaaattgacacgcagagggggtgacctctcagggcaaggccaggatgtgctggggtccagatgggtcccaggccggacccacagaaataagggctcagagaggcgaagggagctgccctcagcagcctggcgaatcccttgaccaggcccgggcagggtgggtggcccggcgatctgtgctcaggaggaaaccaggcacattctttccagaggaggaaggcacatgcaccctggggtctgtcgtcgtcctcttccctaacacccccagctgctcccacgcaggccccaagctgcagagcccacacctcttcctaagcccctgccccaaagcccgcgaccctcccggcagcctcacccctccccgccctgccctgccctgccctgcccagtcccagatctcggtgaacgtggaggactgtgaggacacacgggaagtgaaggggccctggggctcccgcgctggcaccggaggcagctcccagggccgccacacgggcggcggtgaccccgcagagcacccactgctacggcgcaagagcctgcagtgggcccggaggctgagccgcaaggcgcccaagcaggcaggccgggcggcggccgcggagtggatcagccagcagcgcctcagcctgtaccggcgctctgagcgccaggagctctccgagctggtgaagaaccgcatgaagcacctggggctgcccaccaccggctacggtaagggcacacggcgcgggtgggggccggacggacggactgggccagggtcgggccacagccaagaacagtcggccacggcgtcccggggcccgggccgtcctcctgtctgtcatctgtctgtctgtcagcctttctggccaccctctgcctgcctctactgtggggccagctgtgggcaccaccacggcccagcagaggccccgtgcagaggagggaagtggccatggcccaccctggtgctgggaggccacaggacccttgggcatccctggtgtgagccccgtagggaggtgctcgcttccactgctctggggcctcagtttccctctctgccaaattagagacaggagctggctgagccctttggccaggggaggcagctgtggggtggagagggccaggctgggctccccaagtcgagggcatcagctagagttgggccagccagctgcagccaggcctgctggacagcggatacccagggtccctgagttctcgcagagaacaagactggtggggaccccctcccagagcccccagccctcccagcagccagggtaggggggagactttgggggaacagttgggggaaaggcccatgccaggacatgcctctgtccaccatgggcctgttgccactcccacggcacagccccctcctgccgcttcagggagcccggcgtccgtcttcagcaacagatccgtgcagccccctctctctgcgccttgtggtgggaagtgtgcttgggcttcggggccctacatgccctgcctggcgtggagagaagctcatcccctccctcactctagagatgctacctccgttgatgaagccatgggccccagctccccagcaccgggccgctacccagtgacacccacccctgagccgggtcgaggctccaccttccctttgttccatctcagggacttgcctgatgctcagggctgcctctgtcccgtcggagtgccccgtctcccaaccctgcttcctgcgtctgtcacctgggtcggggtcttgagtcccctgagcagagtcaggagctcacggctggcccaggagctgctcacgggtgactgggctgggctggcctgcgggcccgaaggagactcagaggccagggtttggggaacaggtggcctgtgaagacctttcccggcccccagccctgtgggcgctggggaaggtgtccccctgtccccgccttgaagcttccctccatccccacagtgtccctgtcccgggagggacttcacgccctttcaggtggggctcacgaggctgaggggggtgcccagcattcatgtttgtggtcccctgtgactgctggcagaggatgatcccgcccggtctggccacccccagagctggtgcctgcctctgcgaccgctgcctgcccccagagcttggcaaggaaggagcaactgcctttctggtgaccgactcgcttctggtggccggcctcccgtgcagctgcccctgcacccgcccactgtgccggccgcccgcacctcgcttgctgatattctctctctctctctttctgtctgtgcctctttctgtgtgttctgtagaggacgtagcaaatttaacagccagtgatgtcatgaatcgggtaaacctgggatatttgcaaggtaattctgccctggcgggtgccgaccaccgcacaacggggctcgccaacccttcaccgccggcagccttgctgcgccatcccggccaggcaggtggacaggagctgtgagagcacgtcccaggtgtcagcccaggcggccctgttgggcaaggcctcgcatgccgacagagtgtcccctggctgggcgttgaggacgggcctgaggctgaggtctggggcttgtgctagtcaaggtgctgttggccgccaggcagagtggcgactgcccagctctcgggctcaccctggtgctgcttctcctgctttgctgtttacgatgagctctgatgtgaccggtgggccaccctggcctacagccagcccttccctgtggccggccccacaagcagtctgaggaccctaagctcctctgctctcaggaagcacccagagggtcccgagccagggccccgggaggagctcggtgaagcctgggctggatgcaggggtggggactccaagccacgaggagtaggcaggctttatggctgcccaggccaggtggatggtgaccttcgtcccccagctggggctccacgaggggattcttcctgctcggctcgagcagagccgctccacaccccgtttcctccaagaacatgctgtgccccgtcagtgctcagcagagtccgggccagggtgctcccaggggtcctggcagcctcaggggagctcagagcctgcccccgctgccacacctccctacagggtaacccaggagcttgaagggcctcctgagccaggacgggtgttagctcgggagggacctgtttgccacaatgcccttgcacccggaggcagggccaggcctggggcagccacagaagtaaagcgtcggcctctcccggctctgtgcttttccccacgatggcgctcatggaagaccctcgctctgccgggcactgtggtgctcggacctgcagctagcggccttcatgagtgggatgcctgcgtcgcccgctcccctcacccgccaaagcttcctgcggctcccactgcagctccagggcaggcatggccacagcgggcttggggggcgagggctcacaggactcccgcggcaggcatttcctgggctcggcctacatgcccgggagggtgacggtgccggggttctggggctggggagctgcacccccatgtttagattcaagcggagcctaggccaagaggcagaacaggaagagtcacaccctttgcggggagggcgggcagcatcctggggcccctccagcgtgcagcccccatcccacacacacagcgggaggaggcaccccagccccgatactcacacaaatcccctcttcacgccttcctcacagctgccgtggggggaggcactagttatccccagtttatagagaaggaaactgaggctcgggtggcggtagctctggcctggcgtgggggattcaggcgggagtgaccgtggatgccaagagccaggaggtctggaagcctctggggcctgcagggttaggaagcgggttggggggcgagcagagctaccactgaggcctggagtaaaggtcggagggtctgggtggaggagtcaggtagccctggggaccaggggcgaggtggccctgccccaggacatgcaccagaagagccaaagccagcccctgccccaccccaggccctcaggcacacctgctgccagccttcaccaagcaccgtggacacgcgaagctagtcctctgcgaccatcctgggcagccaggaccagtgccatgtgactgaccacaacccaggccctggcactgcagctggggcctggcatccccacccgccccctagcccagccccaagaaacacaaagcccagcctggctcagcccagtgagctctgcttacttcagaagcgtgtggtccgggcaccccagcgggagaagctggggcctgggggccagtctgtgcctgccggagtgaaatgagctggtggccccttgttctcggtgtcccactgggtgctcgtcacaaagccagtcaggcaggggggcagggtcccaagaacctactagagctgccctcaccacccactccctgtgccacctgccatgcggccaccccagaagcgtgtgtgggcacgagggtggggagggtgtgtctccctgcacagcctcagcatgaggcccctgggcctcctccaaaggcctggggaagaccccaccatgggttttgggaaaagagcaaaacagctgtgaggggcaggtgtcaggccgtcccatcccgcaggtgtggacacaggagctggcaccaaatgacctgccgccgtgtgcgaaaggcctgaagcagagctggtctcctggccggagctgccctggtcgcccccaagtcctagcctgtgcccccgccaccctggcagcagctgtgctcacactgtgggaactccaaagcccccactgcagagggaccagcatggcccccacctggctggccagcagcctccccgacttttcccttctcagggaccagggcagggctaccccaaggggagaggacgggcagagaggagggaatggcagcagccagggtggaggctccctggggtcccccgtcctgggtcacctttgttctctgtccttggagtcctggaacaggaatccaggagcttcccgtagacaccatcagatggataaactgaggccacagaccctttccagccagtgaacccagggccactgctgggatggtggcctctccctccctgtgcttggcagggctaccctgccggccccatggagactgtgagatgatgggggggctgtctctccaggaccgttctcaccctgtgggacacatgcccacgcccaccccatgagccggacgccaggctgtctcccatgaggggcagaggccatgttctcggagggatgagctgcggggtgggggtgctctgggctgatgccactcaggacttcagtctgaagcaaagggctgagcacagcgagtgggaatggcctgtccaggcccggggacagcggcagctgcagggccctgagggagggacagggctgagcagcctctggaggcgggggtgggggtgtgtggatgtggaggacggcatgcaggtgtgtatatgagtgagtgtgcaggggtctgtggataccataggcatgggttgctatgaagatctgtgcagacacacaaatgtgtgtggaatacagaggtgaatctgcaggtgtgtgcaggtgtagatgaaggcatgcatgcatgtgaggtgaacagacacgtcccggtgtctgcaggctgacgtacgtggcaggtgtgcgctggtgtgtgcaggtgtgctcagtgcctctgctcagggccacccctttgctgcgatgccacctagcaccagaggtgggtgcgggtcagagctggctcccagctgccctcctggctgtcccctgccctgtgtggagatgggacaggtgtcggtcagggatgggccctggctgggctcaccaggatgaggtgctggagcagaatggtcaggaaggccggaaagactcagctcatcctggagcccccacacctctgggcccctgcagagctgggaggggcagggctgggggggtgacgtctgcccggctgtgtcctttgcagacgagatgaacgaccaccagaacaccctctcctacgtcctcatcaaccctccgcccgacacgaggctggagcccagtgacattgtgtgagtagcacctgtgggctgtgtggagaccccccctgagcaccaggtgggcactggggagatgaggccacaggcaccacagtggggccgctcagcagagggctgagcaggggctgcccggcccacatccactccagggtcctctgtgccctcccgcagctatctcatccgctccgaccccctggctcacgtggccagcagctcccagagccggaagagcagctgcagccacaagctgtcgtcctgcaaccccgagactcgcgacgagacacagctctgagccagccctgcacggagctcaggccaccaagcccggggtcctcaggaaggacgtggaggagcgtgtgaggacacggtggcactagcgtgaccctggggatggcacactctactcaccatggctcctgggactccaccctggaaaggagcccctcatgcggggggagggccagctcacccctgggcacctgcaggctagtgaggagagttttttaacctatttttacacgtcgatgcagtccacttctctttacacagatgtaccgcaactcgtgaccagggctggctgggagggcaacgcagggactggacgccctacagggccgagcccaggctgtgctggagggtggggctggggtgcatggggaggggagcagaacccagaacccaggagccccgcgtgggccacacccaactcagagccggcctgagcgttcacggccaggcagcctcgcttccttgcagccaagggctgggggccagggctgctgttctgcactctggggtgggtgagggggaccctgggctgtttgctgtcccaagccccttctggaagttagaagcagcaaagggcccggggaagccgggcatgtgagaggggtgcgtccccaggtcccccagagggccctgtcgccgaggacctttctgaaggaagcagaagacgccatttcctctacttcacactgaactgtcccagccactgcatctagggggcattgggcggaagatggtgcatttccatggaccattttacacttaccttttaaagcaaagcctcattttctaaacccctgacttgtgaagcacaattcagcctccgggctgggccacgtggagagagaggatcttctcagcaaggcgagatcccgggcggcggctgacatcaggagcgccaccctgcgtcctttgctgctggttccttactggtttgtacggtcagcgctggaaacttctattaaatggatgcattctggaggcatgaagttacaagtcaagtcgccctgctcgtgtttccaaggctctcacccctcccagccaccccactttaagggttacaaacacctgctggggtccccaccccaaccccataggcaagcccccattccccagccaggccaggacagtccttccaaaactcgggaaccaaattgtatttggctactggtgactggatcctggtagccaggaaacctgcctggtggtgggggtcccagagtccaggagggctgtctggtgagctgcccatcagcctcacccctgcagccaggcatgtccctggggtgggcacagagaccccaggctctgcccgcagtggcacagaactcatctgaggccagtggctgctggggatcccctacactgggggtcagggctgccccaggtggggatgtgtgtgcacctcaccacgttcacttcagggtaccccaagaggctgaaggggaaggaccaaaaggccgaggtgcagcccctccccggtgtcagggcagacaacacagcagctgctggaggggccggccctggccacacagactagctagtcccttactcccggcctgtctggaaccctcctgctcagaaggtgcccactagccctctgtgggggacagagccagacatgggtggtcagggagaggctgtgtggattcaggggaccagaaagtaagtcccaggaccttgatggagcggcagggattgatgttgggctagggtggccagagcctgtcccagcagggctggggtctatcacgttcctgggatccaagcagcgagcacgccctgccccgcagtcaccccgccccgcagtcgccctgcagctggaaggcccaagtctgcctcacctgggtggcctctcatgtcccccacaccctggcccccaggcgaggggggctgcacagcacctgcagggaggagaagggagagaaaagccggtctggctgctgggatgggagggccacagttccagcagtggcaggggaagctgtagcccctggagccccacactggaagagctggcctgcaggaggcaccatgggggagtcgcatgacttattcgggattgacttgcgatgtggatggtgttcccggagtcccctgtggccactccaccaccatgaggccgggaggcatcttagcctttgagcctctctccaggggtgagcggagccccccaaagagggctgaaggcttgctgcccaagaggggctgggtgagcacttggggcctctgagaacatcagtggtccgttccctcctgcacactggtggcaagtggcagcattttttcataatctccagtaatgaggccacttcgggtccagccctggacatccgaggaggaggcgggcagtccctgccccttcactaaccgcagaggatgccagctctaggccccctgctccgcctggagctcatgcgggcagccgtggacacaggtggcacccagcgcccagcggcctgtgaatcctcccgtgggcaaagctgggagccaggggctggaaccaggcaggtcagtgactgtgagatgccagctgccagcccaagaaaagctgcctgcagcatctggaaacttctgtgctctccttggcctctgtgttcttcatctccaggtttagggagcacccgggtgcctctctgcttgtcccgagcccactcaccaacagccccagcttgcacagtcatgacatcaggaaggtgggtccctgctcccagccgtcctcgtccaccatcacttctcccagcctcgtgtcctgctgacccataaaaggtccccctgcaaagtacaccaagtgaagtaggatctgagcaaaggttgagggactgaattccctaagaagtcatcactgcctagaataagcgaaaagaattttttttaatgttttacggtagaattatttgaaacatacaaaatgagtgagacacctgctattttccttattcctgttttttgtttgtttttattttccttatacctaattcatctaacagaaaactgggcagggcgcagtgtctcacacctgtaatcccagcactttgggaggccaaggcaggtggactgcttgagcccaggagttgagtttaagatcagcgtgggcaacatgatgaaccctgactgtatcaaaaagtacaaaaaaaaaaatagctagacgtggtggcatgtgcatacagtcccaggtacccaagaggctgaggaaggaggatcacctgagctggggaggttgaggctgccgtgagctgagatggcaccactgcactccagcctgggtggcagagagagaccctgtctcaaacaaaacaaacaaacaaaaaagaaaaagaaaataaaactgtttgctcaaaatcagaataccaacagtgtattgggtgattatcgcttatgtgtgagtgaaatgtaagagcaacgttaaaagggacaggtgggaggaagcgggggccatcagttacaagttaccatgtgacctgagaagcagtacagtgtaacttacaggtggatctggatgagctgcaaactctagggcaaccactaaaatatatatatacttatttttctttttattatttttttctatatatggaagtataattgatacgctacaaaagacaagactatggaatcatataaaatgcttaactgaaaccagagaaagcagaaaagaaaggcagatagaaactaagaccaagggcaacaaatagaaaacagttacaaatatggtagatgataatcccacgaacccagtcatcacattcaatgtacatgaattagtctaaatacaccaattaaaatacagagactggccgggcgcggtggctcacacctctaatcccagcactctgggaggccgag

SEQ ID NO: 3 - DNA, 7123 bp, Homo sapiens
agggcaacgcgagggaagaaggtggcggctcccactcgcttctccctcgggtcgggtccgagctgccaggccgcatgccactccctgacggggcgcggaccccggggggcgtctgccgggaggcgcgcggcgggggctacaccaaccggaccttcgagtttgacgacggccaatgcgcccccaggcggccctgcgcgggggacggcgcgctcctggacaccgccggcttcaagatgagcgacctggactccgaggtgctgcccttgccgccgcgctaccgcttccgggacctgctgctgggcgacccgtccttccagaacgacgacagggtccaggtggagttctacgtcaacgagaacaccttcaaggagcggctcaagctgttcttcatcaaaaaccaaagatcgagcctgaggatccggctgttcaacttctccctgaagctgctcacctgcctgctctacattgtgcgcgtcctgctcgatgacccggccctgggcatcggatgctggggctgcccaaagcagaactactccttcaatgactcgtcctccgagatcaactgggctcctattctgtgggtggagagaaagatgacactgtgggcgatccaggtcatcgtggccataataagcttcctggagacgatgcttctcatctacctcagctacaaaggcaacatctgggagcagatcttccgcgtgtccttcgtcctggagatgatcaacactctgcccttcatcatcacgatcttctggccgccgctgcggaacctgttcatccccgtctttctgaactgctggctggccaagcacgcgctggaaaacatgattaatgacttccaccgtgccatcctgcggacacagtcagccatgttcaaccaggtcctcatcctcttctgcaccctgctgtgcctcgttttcacggggacctgcggcatccagcacctggagcgggcgggcgagaacctgtccctcctgacctccttctacttctgcatcgtcaccttctccaccgtgggctacggtgacgtcacgcccaagatctggccatcgcagctgctggtggtcatcatgatctgcgtggccctcgtggtgctcccactgcagttcgaggagctcgtctacctctggatggagcggcagaagtcagggggcaactacagccgccaccgtgcgcagacggagaagcacgtggtcctgtgtgtcagctccctcaagatcgaccttctcatggacttcctgaacgagttctacgcccacccccggctccaggactattacgtggtcatcctgtgccccacggagatggatgtccaggtgcgcagagtcctgcagatccctctgtggtcccagcgggtcatctacctccagggctctgcactcaaagaccaggacctcatgcgagccaagatggacaatggggaggcctgcttcatcctcagcagcaggaacgaggtggaccgcacggctgcagaccaccagaccatcctgcgcgcctgggccgtgaaggacttcgcccccaactgccccctctacgtccagatcctcaaacctgaaaacaagtttcacgtcaagtttgctgaccacgtggtgtgtgaggaggagtgcaagtacgccatgctggcgctgaactgcatctgcccggcgacctccaccctcatcaccctgctggtgcacacgtcccgcggccaggagggacaggagtctccggagcagtggcagcgcatgtatgggcgctgctccggcaacgaggtgtaccacatccgcatgggtgacagcaagttcttccgcgagtacgagggcaagagcttcacctacgcggccttccacgcccacaagaagtatggcgtgtgcctcatcgggctgaagcgggaggacaacaagagcatcctgctgaacccggggccccggcacatcctggccgcctctgacacctgcttctacatcaacatcaccaaggaggagaactcggccttcatcttcaagcaggaggagaagcggaagaagagggccttctcggggcaggggctgcacgagggtccggcccgcctgcccgtgcacagcatcatcgcctccatggggacagtggccatggacctgcagggcacagagcaccggcctacgcagagcggcggtgggggcgggggcagcaagctggcactgcccacggagaacggctcgggcagccggcggcccagcatcgcgcccgtcctggaactggccgacagctcagccctgctgccctgcgacctgctgagcgaccagtcggaggatgaggtgacgccgtcggacgacgaggggctctccgtggtagagtatgtgaagggctaccctcccaactcgccctacatcggcagctccccaaccctgtgccacctcctgcctgtgaaagcccccttctgctgcctgcggctggacaagggctgcaagcacaacagctatgaagacgccaaggcctacgggttcaagaacaagctgatcatcgtctcggcagagacggccggcaatgggctgtacaacttcatcgtgccactgcgggcctactacagatcccgcaaggagctgaaccccatcgtgctgctgctggacaacaagcccgaccaccacttcctggaagccatctgctgcttccccatggtctactacatggagggctctgtggacaacctggacagcctgctgcagtgtggcatcatctatgcggacaacctggtggtggtggacaaggagagcaccatgagcgccgaggaggactacatggcggacgccaagaccatcgtcaacgtgcagaccatgttccggctcttccccagcctcagcatcaccacggagctcacccacccttccaacatgcgcttcatgcagttccgcgccaaggacagctactctctggctctttccaaactagaaaagagggagcgagagaatggctccaacctggccttcatgttccgcctgccgttcgccgccggccgcgtcttcagcatcagcatgttggacacactgctctaccagtccttcgtgaaggactacatgatcaccatcacccggctgctgctgggcctggacaccacgccgggctcggggtacctctgtgccatgaaaatcaccgagggcgacctgtggatccgcacgtacggccgcctcttccagaagctctgctcctccagcgccgagatccccattggcatctaccggacagagagccacgtcttctccacctcggagccccacgacctcagagcccagtcccagatctcggtgaacgtggaggactgtgaggacacacgggaagtgaaggggccctggggctcccgcgctggcaccggaggcagctcccagggccgccacacgggcggcggtgaccccgcagagcacccactgctacggcgcaagagcctgcagtgggcccggaggctgagccgcaaggcgcccaagcaggcaggccgggcggcggccgcggagtggatcagccagcagcgcctcagcctgtaccggcgctctgagcgccaggagctctccgagctggtgaagaaccgcatgaagcacctggggctgcccaccaccggctacgacgagatgaacgaccaccagaacaccctctcctacgtcctcatcaaccctccgcccgacacgaggctggagcccagtgacattgtctatctcatccgctccgaccccctggctcacgtggccagcagctcccagagccggaagagcagctgcagccacaagctgtcgtcctgcaaccccgagactcgcgacgagacacagctctgagccagccctgcacggagctcaggccaccaagcccggggtcctcaggaaggacgtggaggagcgtgtgaggacacggtggcactagcgtgaccctggggatggcacactctactcaccatggctcctgggactccaccctggaaaggagcccctcatgcggggggagggccagctcacccctgggcacctgcaggctagtgaggagagttttttaacctatttttacacgtcgatgcagtccacttctctttacacagatgtaccgcaactcgtgaccagggctggctgggagggcaacgcagggactggacgccctacagggccgagcccaggctgtgctggagggtggggctggggtgcatggggaggggagcagaacccagaacccaggagccccgcgtgggccacacccaactcagagccggcctgagcgttcacggccaggcagcctcgcttccttgcagccaagggctgggggccagggctgctgttctgcactctggggtgggtgagggggaccctgggctgtttgctgtcccaagccccttctggaagttagaagcagcaaagggcccggggaagccgggcatgtgagaggggtgcgtccccaggtcccccagagggccctgtcgccgaggacctttctgaaggaagcagaagacgccatttcctctacttcacactgaactgtcccagccactgcatctagggggcattgggcggaagatggtgcatttccatggaccattttacacttaccttttaaagcaaagcctcattttctaaacccctgacttgtgaagcacaattcagcctccgggctgggccacgtggagagagaggatcttctcagcaaggcgagatcccgggcggcggctgacatcaggagcgccaccctgcgtcctttgctgctggttccttactggtttgtacggtcagcgctggaaacttctattaaatggatgcattctggaggcatgaagttacaagtcaagtcgccctgctcgtgtttccaaggctctcacccctcccagccaccccactttaagggttacaaacacctgctggggtccccaccccaaccccataggcaagcccccattccccagccaggccaggacagtccttccaaaactcgggaaccaaattgtatttggctactggtgactggatcctggtagccaggaaacctgcctggtggtgggggtcccagagtccaggagggctgtctggtgagctgcccatcagcctcacccctgcagccaggcatgtccctggggtgggcacagagaccccaggctctgcccgcagtggcacagaactcatctgaggccagtggctgctggggatcccctacactgggggtcagggctgccccaggtggggatgtgtgtgcacctcaccacgttcacttcagggtaccccaagaggctgaaggggaaggaccaaaaggccgaggtgcagcccctccccggtgtcagggcagacaacacagcagctgctggaggggccggccctggccacacagactagctagtcccttactcccggcctgtctggaaccctcctgctcagaaggtgcccactagccctctgtgggggacagagccagacatgggtggtcagggagaggctgtgtggattcaggggaccagaaagtaagtcccaggaccttgatggagcggcagggattgatgttgggctagggtggccagagcctgtcccagcagggctggggtctatcacgttcctgggatccaagcagcgagcacgccctgccccgcagtcaccccgccccgcagtcgccctgcagctggaaggcccaagtctgcctcacctgggtggcctctcatgtcccccacaccctggcccccaggcgaggggggctgcacagcacctgcagggaggagaagggagagaaaagccggtctggctgctgggatgggagggccacagttccagcagtggcaggggaagctgtagcccctggagccccacactggaagagctggcctgcaggaggcaccatgggggagtcgcatgacttattcgggattgacttgcgatgtggatggtgttcccggagtcccctgtggccactccaccaccatgaggccgggaggcatcttagcctttgagcctctctccaggggtgagcggagccccccaaagagggctgaaggcttgctgcccaagaggggctgggtgagcacttggggcctctgagaacatcagtggtccgttccctcctgcacactggtggcaagtggcagcattttttcataatctccagtaatgaggccacttcgggtccagccctggacatccgaggaggaggcgggcagtccctgccccttcactaaccgcagaggatgccagctctaggccccctgctccgcctggagctcatgcgggcagccgtggacacaggtggcacccagcgcccagcggcctgtgaatcctcccgtgggcaaagctgggagccaggggctggaaccaggcaggtcagtgactgtgagatgccagctgccagcccaagaaaagctgcctgcagcatctggaaacttctgtgctctccttggcctctgtgttcttcatctccaggtttagggagcacccgggtgcctctctgcttgtcccgagcccactcaccaacagccccagcttgcacagtcatgacatcaggaaggtgggtccctgctcccagccgtcctcgtccaccatcacttctcccagcctcgtgtcctgctgacccataaaaggtccccctgcaaagtacaccaagtgaagtaggatctgagcaaaggttgagggactgaattccctaagaagtcatcactgcctagaataagcgaaaagaattttttttaatgttttacggtagaattatttgaaacatacaaaatgagtgagacacctgctattttccttattcctgttttttgtttgtttttattttccttatacctaattcatctaacagaaaactgggcagggcgcagtgtctcacacctgtaatcccagcactttgggaggccaaggcaggtggactgcttgagcccaggagttgagtttaagatcagcgtgggcaacatgatgaaccctgactgtatcaaaaagtacaaaaaaaaaaatagctagacgtggtggcatgtgcatacagtcccaggtacccaagaggctgaggaaggaggatcacctgagctggggaggttgaggctgccgtgagctgagatggcaccactgcactccagcctgggtggcagagagagaccctgtctcaaacaaaacaaacaaacaaaaaagaaaaagaaaataaaactgtttgctcaaaatcagaa

SEQ ID NO: 4-10 - skipped (7 entries)

SEQ ID NO: 11 - DNA, 19 bp, Artificial sequence
  Primer
gtcaacgtgcagaccatgt

SEQ ID NO: 12 - DNA, 22 bp, Artificial sequence
  Primer
tcgctccctcttttctagtttg

SEQ ID NO: 13 - DNA, 23 bp, Artificial sequence
  Probe
agctcacccacccttccaacatg

SEQ ID NO: 14 - DNA, 20 bp, Artificial sequence
  Primer
caggtggagttctacgtcaa

SEQ ID NO: 15 - DNA, 20 bp, Artificial sequence
  Primer
gagaagttgaacagccggat

SEQ ID NO: 16 - DNA, 24 bp, Artificial sequence
  Probe
tgatgaagaacagcttgagccgct

SEQ ID NO: 17-20 - skipped (4 entries)

SEQ ID NO: 21 - DNA, 20 bp, Artificial sequence
  Synthetic oligonucleotide
agtgggagccgccaccttct

SEQ ID NO: 22 - DNA, 20 bp, Artificial sequence
  Synthetic oligonucleotide
ctggcagctcggacccgacc

SEQ ID NO: 23 - DNA, 20 bp, Artificial sequence
  Synthetic oligonucleotide
gtgtagcccccgccgcgcgc

SEQ ID NO: 24 - DNA, 20 bp, Artificial sequence
  Synthetic oligonucleotide
ggagcgcgccgtcccccgcg

SEQ ID NO: 25 - DNA, 20 bp, Artificial sequence
  Synthetic oligonucleotide
caggtcgctcatcttgaagc

SEQ ID NO: 26 - DNA, 20 bp, Artificial sequence
  Synthetic oligonucleotide
cgtagaactccacctggacc

SEQ ID NO: 27 - DNA, 20 bp, Artificial sequence
  Synthetic oligonucleotide
ggacgcgcacaatgtagagc

SEQ ID NO: 28 - DNA, 20 bp, Artificial sequence
  Synthetic oligonucleotide
tcgcccacagtgtcatcttt

SEQ ID NO: 29 - DNA, 20 bp, Artificial sequence
  Synthetic oligonucleotide
tattatggccacgatgacct

SEQ ID NO: 30 - DNA, 20 bp, Artificial sequence
  Synthetic oligonucleotide
gttgatcatctccaggacga

SEQ ID NO: 31 - DNA, 20 bp, Artificial sequence
  Synthetic oligonucleotide
acaggttctcgcccgcccgc

SEQ ID NO: 32 - DNA, 20 bp, Artificial sequence
  Synthetic oligonucleotide
ggccacgcagatcatgatga

SEQ ID NO: 33 - DNA, 20 bp, Artificial sequence
  Synthetic oligonucleotide
tgccgctccatccagaggta

SEQ ID NO: 34 - DNA, 20 bp, Artificial sequence
  Synthetic oligonucleotide
cgttcaggaagtccatgaga

SEQ ID NO: 35 - DNA, 20 bp, Artificial sequence
  Synthetic oligonucleotide
gaagtccttcacggcccagg

SEQ ID NO: 36 - DNA, 20 bp, Artificial sequence
  Synthetic oligonucleotide
cttcagcccgatgaggcaca

SEQ ID NO: 37 - DNA, 20 bp, Artificial sequence
  Synthetic oligonucleotide
gccgagttctcctccttggt

SEQ ID NO: 38 - DNA, 20 bp, Artificial sequence
  Synthetic oligonucleotide
caggacgggcgcgatgctgg

SEQ ID NO: 39 - DNA, 20 bp, Artificial sequence
  Synthetic oligonucleotide
acctcatcctccgactggtc

SEQ ID NO: 40 - DNA, 20 bp, Artificial sequence
  Synthetic oligonucleotide
agcttgttcttgaacccgta

SEQ ID NO: 41 - DNA, 20 bp, Artificial sequence
  Synthetic oligonucleotide
tctgccgagacgatgatcag

SEQ ID NO: 42 - DNA, 20 bp, Artificial sequence
  Synthetic oligonucleotide
gttgtacagcccattgccgg

SEQ ID NO: 43 - DNA, 20 bp, Artificial sequence
  Synthetic oligonucleotide
gtagtaggcccgcagtggca

SEQ ID NO: 44 - DNA, 20 bp, Artificial sequence
  Synthetic oligonucleotide
gatgctgaagacgcggccgg

SEQ ID NO: 45 - DNA, 20 bp, Artificial sequence
  Synthetic oligonucleotide
cagaggtaccccgagcccgg

SEQ ID NO: 46 - DNA, 20 bp, Artificial sequence
  Synthetic oligonucleotide
tgcaggctcttgcgccgtag

SEQ ID NO: 47 - DNA, 20 bp, Artificial sequence
  Synthetic oligonucleotide
tgctggctgatccactccgc

SEQ ID NO: 48 - DNA, 20 bp, Artificial sequence
  Synthetic oligonucleotide
atgcggttcttcaccagctc

SEQ ID NO: 49 - DNA, 20 bp, Artificial sequence
  Synthetic oligonucleotide
ccaccgtgtcctcacacgct

SEQ ID NO: 50 - DNA, 20 bp, Artificial sequence
  Synthetic oligonucleotide
gtagagtgtgccatccccag

SEQ ID NO: 51 - DNA, 20 bp, Artificial sequence
  Synthetic oligonucleotide
agccctggtcacgagttgcg

SEQ ID NO: 52 - DNA, 20 bp, Artificial sequence
  Synthetic oligonucleotide
tgccccctagatgcagtggc

SEQ ID NO: 53 - DNA, 20 bp, Artificial sequence
  Synthetic oligonucleotide
ccatcttccgcccaatgccc

SEQ ID NO: 54 - DNA, 20 bp, Artificial sequence
  Synthetic oligonucleotide
ggaaatgcaccatcttccgc

SEQ ID NO: 55 - DNA, 20 bp, Artificial sequence
  Synthetic oligonucleotide
ccgtacaaaccagtaaggaa

SEQ ID NO: 56 - DNA, 20 bp, Artificial sequence
  Synthetic oligonucleotide
gcgctgaccgtacaaaccag

SEQ ID NO: 57 - DNA, 20 bp, Artificial sequence
  Synthetic oligonucleotide
ggtttacccgattcatgaca

SEQ ID NO: 58 - DNA, 20 bp, Artificial sequence
  Synthetic oligonucleotide
acacagcacctttagacggg

SEQ ID NO: 59 - DNA, 20 bp, Artificial sequence
  Synthetic oligonucleotide
actgctccctaatatgggcc

SEQ ID NO: 60 - DNA, 20 bp, Artificial sequence
  Synthetic oligonucleotide
aaatgaccaactcactggcg

SEQ ID NO: 61 - DNA, 20 bp, Artificial sequence
  Synthetic oligonucleotide
cctggcatagccagacacgg

SEQ ID NO: 62 - DNA, 20 bp, Artificial sequence
  Synthetic oligonucleotide
tgccgtaccctacacgctgg

SEQ ID NO: 63 - DNA, 20 bp, Artificial sequence
  Synthetic oligonucleotide
acttcctgcccaatatcgga

SEQ ID NO: 64 - DNA, 20 bp, Artificial sequence
  Synthetic oligonucleotide
ggagggtcctccaagcggct

SEQ ID NO: 65 - DNA, 20 bp, Artificial sequence
  Synthetic oligonucleotide
ttcacggcccctaaaccacc

SEQ ID NO: 66 - DNA, 20 bp, Artificial sequence
  Synthetic oligonucleotide
ggaggatttcccacgacatc

SEQ ID NO: 67 - DNA, 20 bp, Artificial sequence
  Synthetic oligonucleotide
ggccattgagccaccaaggg

SEQ ID NO: 68 - DNA, 20 bp, Artificial sequence
  Synthetic oligonucleotide
cattttaaccctctttgccg

SEQ ID NO: 69 - DNA, 20 bp, Artificial sequence
  Synthetic oligonucleotide
tcaatcccgaacaccatgtc

SEQ ID NO: 70 - DNA, 20 bp, Artificial sequence
  Synthetic oligonucleotide
ggtccgaaatcccaagcctg

SEQ ID NO: 71 - DNA, 20 bp, Artificial sequence
  Synthetic oligonucleotide
gtgccggaatcctcaccctt

SEQ ID NO: 72 - DNA, 20 bp, Artificial sequence
  Synthetic oligonucleotide
accgggcacagatcccacct

SEQ ID NO: 73 - DNA, 20 bp, Artificial sequence
  Synthetic oligonucleotide
tccgtgagatccacactcca

SEQ ID NO: 74 - DNA, 20 bp, Artificial sequence
  Synthetic oligonucleotide
ggcttctatctcacacccgt

SEQ ID NO: 75 - DNA, 20 bp, Artificial sequence
  Synthetic oligonucleotide
ccgtctgctcaaaccatcag

SEQ ID NO: 76 - DNA, 20 bp, Artificial sequence
  Synthetic oligonucleotide
ggcggtacccagggaccacc

SEQ ID NO: 77 - DNA, 20 bp, Artificial sequence
  Synthetic oligonucleotide
ccagccttcgccatcgccag

SEQ ID NO: 78 - DNA, 20 bp, Artificial sequence
  Synthetic oligonucleotide
gcgcctggctattgggagct

SEQ ID NO: 79 - DNA, 20 bp, Artificial sequence
  Synthetic oligonucleotide
acctgtgtctcggctgaggc

SEQ ID NO: 80 - DNA, 20 bp, Artificial sequence
  Synthetic oligonucleotide
cgtctcggctgaggcccacg

SEQ ID NO: 81 - DNA, 20 bp, Artificial sequence
  Synthetic oligonucleotide
caccatggccatacccatcg

SEQ ID NO: 82 - DNA, 20 bp, Artificial sequence
  Synthetic oligonucleotide
gcattgcacttatccagcgc

SEQ ID NO: 83 - DNA, 20 bp, Artificial sequence
  Synthetic oligonucleotide
gtccaccccagacgatccac

SEQ ID NO: 84 - DNA, 20 bp, Artificial sequence
  Synthetic oligonucleotide
atggtccatcccagaaggtc

SEQ ID NO: 85 - DNA, 20 bp, Artificial sequence
  Synthetic oligonucleotide
agagggtccaccatggatgg

SEQ ID NO: 86 - DNA, 20 bp, Artificial sequence
  Synthetic oligonucleotide
ggtccacccaagagggtcca

SEQ ID NO: 87 - DNA, 20 bp, Artificial sequence
  Synthetic oligonucleotide
tgtgcaggctgacagcgggt

SEQ ID NO: 88 - DNA, 20 bp, Artificial sequence
  Synthetic oligonucleotide
tcctgccccagacgcaccgt

SEQ ID NO: 89 - DNA, 20 bp, Artificial sequence
  Synthetic oligonucleotide
gtgtgcacacgcgccctgcc

SEQ ID NO: 90 - DNA, 20 bp, Artificial sequence
  Synthetic oligonucleotide
tcaggtaccgccgctcaccc

SEQ ID NO: 91 - DNA, 20 bp, Artificial sequence
  Synthetic oligonucleotide
gggctcttacccacatactt

SEQ ID NO: 92 - DNA, 20 bp, Artificial sequence
  Synthetic oligonucleotide
cgccagccttaccttgtcca

SEQ ID NO: 93 - DNA, 20 bp, Artificial sequence
  Synthetic oligonucleotide
agctgtacccacaggcggca

SEQ ID NO: 94 - DNA, 20 bp, Artificial sequence
  Synthetic oligonucleotide
ccgagcatccccctacgcct

SEQ ID NO: 95 - DNA, 20 bp, Artificial sequence
  Synthetic oligonucleotide
gttcgcccttactcatcagt

SEQ ID NO: 96 - DNA, 20 bp, Artificial sequence
  Synthetic oligonucleotide
cacaggtccataccccaccg

SEQ ID NO: 97 - DNA, 20 bp, Artificial sequence
  Synthetic oligonucleotide
tccgagcaccacagtgcccg

SEQ ID NO: 98 - DNA, 20 bp, Artificial sequence
  Synthetic oligonucleotide
tgcccggaccacacgcttct

SEQ ID NO: 99 - DNA, 20 bp, Artificial sequence
  Synthetic oligonucleotide
cgagtgggagccgccacctt

SEQ ID NO: 100 - DNA, 20 bp, Artificial sequence
  Synthetic oligonucleotide
gcgccccgtcagggagtggc

SEQ ID NO: 101 - DNA, 20 bp, Artificial sequence
  Synthetic oligonucleotide
tggtgtagcccccgccgcgc

SEQ ID NO: 102 - DNA, 20 bp, Artificial sequence
  Synthetic oligonucleotide
gtccaggagcgcgccgtccc

SEQ ID NO: 103 - DNA, 20 bp, Artificial sequence
  Synthetic oligonucleotide
tcggagtccaggtcgctcat

SEQ ID NO: 104 - DNA, 20 bp, Artificial sequence
  Synthetic oligonucleotide
agccgctccttgaaggtgtt

SEQ ID NO: 105 - DNA, 20 bp, Artificial sequence
  Synthetic oligonucleotide
cgagcaggacgcgcacaatg

SEQ ID NO: 106 - DNA, 20 bp, Artificial sequence
  Synthetic oligonucleotide
atcgcccacagtgtcatctt

SEQ ID NO: 107 - DNA, 20 bp, Artificial sequence
  Synthetic oligonucleotide
acacgcggaagatctgctcc

SEQ ID NO: 108 - DNA, 20 bp, Artificial sequence
  Synthetic oligonucleotide
gaacaggttccgcagcggcg

SEQ ID NO: 109 - DNA, 20 bp, Artificial sequence
  Synthetic oligonucleotide
ggacaggttctcgcccgccc

SEQ ID NO: 110 - DNA, 20 bp, Artificial sequence
  Synthetic oligonucleotide
cacgagggccacgcagatca

SEQ ID NO: 111 - DNA, 20 bp, Artificial sequence
  Synthetic oligonucleotide
gctgtagttgccccctgact

SEQ ID NO: 112 - DNA, 20 bp, Artificial sequence
  Synthetic oligonucleotide
tggacatccatctccgtggg

SEQ ID NO: 113 - DNA, 20 bp, Artificial sequence
  Synthetic oligonucleotide
gggcgaagtccttcacggcc

SEQ ID NO: 114 - DNA, 20 bp, Artificial sequence
  Synthetic oligonucleotide
cgcttcagcccgatgaggca

SEQ ID NO: 115 - DNA, 20 bp, Artificial sequence
  Synthetic oligonucleotide
ggccgagttctcctccttgg

SEQ ID NO: 116 - DNA, 20 bp, Artificial sequence
  Synthetic oligonucleotide
cggccagttccaggacgggc

SEQ ID NO: 117 - DNA, 20 bp, Artificial sequence
  Synthetic oligonucleotide
cgtcacctcatcctccgact

SEQ ID NO: 118 - DNA, 20 bp, Artificial sequence
  Synthetic oligonucleotide
cgagacgatgatcagcttgt

SEQ ID NO: 119 - DNA, 20 bp, Artificial sequence
  Synthetic oligonucleotide
ctctgccgagacgatgatca

SEQ ID NO: 120 - DNA, 20 bp, Artificial sequence
  Synthetic oligonucleotide
agttgtacagcccattgccg

SEQ ID NO: 121 - DNA, 20 bp, Artificial sequence
  Synthetic oligonucleotide
cttgcgggatctgtagtagg

SEQ ID NO: 122 - DNA, 20 bp, Artificial sequence
  Synthetic oligonucleotide
gtagtccttcacgaaggact

SEQ ID NO: 123 - DNA, 20 bp, Artificial sequence
  Synthetic oligonucleotide
acagaggtaccccgagcccg

SEQ ID NO: 124 - DNA, 20 bp, Artificial sequence
  Synthetic oligonucleotide
ttgcggctcagcctccgggc

SEQ ID NO: 125 - DNA, 20 bp, Artificial sequence
  Synthetic oligonucleotide
ctgctggctgatccactccg

SEQ ID NO: 126 - DNA, 20 bp, Artificial sequence
  Synthetic oligonucleotide
catgcggttcttcaccagct

SEQ ID NO: 127 - DNA, 20 bp, Artificial sequence
  Synthetic oligonucleotide
tagtgccaccgtgtcctcac

SEQ ID NO: 128 - DNA, 20 bp, Artificial sequence
  Synthetic oligonucleotide
gagtagagtgtgccatcccc

SEQ ID NO: 129 - DNA, 20 bp, Artificial sequence
  Synthetic oligonucleotide
gacgcacccctctcacatgc

SEQ ID NO: 130 - DNA, 20 bp, Artificial sequence
  Synthetic oligonucleotide
aatgccccctagatgcagtg

SEQ ID NO: 131 - DNA, 20 bp, Artificial sequence
  Synthetic oligonucleotide
caccatcttccgcccaatgc

SEQ ID NO: 132 - DNA, 20 bp, Artificial sequence
  Synthetic oligonucleotide
ccggaggctgaattgtgctt

SEQ ID NO: 133 - DNA, 20 bp, Artificial sequence
  Synthetic oligonucleotide
accgtacaaaccagtaagga

SEQ ID NO: 134 - DNA, 20 bp, Artificial sequence
  Synthetic oligonucleotide
ccgattcatgacatcactgg

SEQ ID NO: 135 - DNA, 20 bp, Artificial sequence
  Synthetic oligonucleotide
aggtttacccgattcatgac

SEQ ID NO: 136 - DNA, 20 bp, Artificial sequence
  Synthetic oligonucleotide
cccagcttcttaccaggtcg

SEQ ID NO: 137 - DNA, 20 bp, Artificial sequence
  Synthetic oligonucleotide
gggtacacgatacccgttca

SEQ ID NO: 138 - DNA, 20 bp, Artificial sequence
  Synthetic oligonucleotide
gcaccgggccttatctgatc

SEQ ID NO: 139 - DNA, 20 bp, Artificial sequence
  Synthetic oligonucleotide
gcacacggccataagcaggt

SEQ ID NO: 140 - DNA, 20 bp, Artificial sequence
  Synthetic oligonucleotide
ctgccgtaccctacacgctg

SEQ ID NO: 141 - DNA, 20 bp, Artificial sequence
  Synthetic oligonucleotide
gcacagcacgccaagaccgc

SEQ ID NO: 142 - DNA, 20 bp, Artificial sequence
  Synthetic oligonucleotide
cggcacttccaccttaccca

SEQ ID NO: 143 - DNA, 20 bp, Artificial sequence
  Synthetic oligonucleotide
tcctcgaaccttcacggccc

SEQ ID NO: 144 - DNA, 20 bp, Artificial sequence
  Synthetic oligonucleotide
tcggagagccacgcccgtca

SEQ ID NO: 145 - DNA, 20 bp, Artificial sequence
  Synthetic oligonucleotide
acaggaatctttcgaaggcc

SEQ ID NO: 146 - DNA, 20 bp, Artificial sequence
  Synthetic oligonucleotide
ccctccaaacaattatgcga

SEQ ID NO: 147 - DNA, 20 bp, Artificial sequence
  Synthetic oligonucleotide
acagttcaatcccgaacacc

SEQ ID NO: 148 - DNA, 20 bp, Artificial sequence
  Synthetic oligonucleotide
ctaggactattatacccagc

SEQ ID NO: 149 - DNA, 20 bp, Artificial sequence
  Synthetic oligonucleotide
tcgctttgcctaccgcgagc

SEQ ID NO: 150 - DNA, 20 bp, Artificial sequence
  Synthetic oligonucleotide
ccggctcaaaccaccgccag

SEQ ID NO: 151 - DNA, 20 bp, Artificial sequence
  Synthetic oligonucleotide
cggcaggttcccacacgcaa

SEQ ID NO: 152 - DNA, 20 bp, Artificial sequence
  Synthetic oligonucleotide
ggcacggcttctatctcaca

SEQ ID NO: 153 - DNA, 20 bp, Artificial sequence
  Synthetic oligonucleotide
ccctttacctccccgtggac

SEQ ID NO: 154 - DNA, 20 bp, Artificial sequence
  Synthetic oligonucleotide
gcttgtcaccccaccgggca

SEQ ID NO: 155 - DNA, 20 bp, Artificial sequence
  Synthetic oligonucleotide
gccccaccttacaggtgcct

SEQ ID NO: 156 - DNA, 20 bp, Artificial sequence
  Synthetic oligonucleotide
gagtggagactcatcccacc

SEQ ID NO: 157 - DNA, 20 bp, Artificial sequence
  Synthetic oligonucleotide
cacctgtgtctcggctgagg

SEQ ID NO: 158 - DNA, 20 bp, Artificial sequence
  Synthetic oligonucleotide
agtggtgaccaggcctcgct

SEQ ID NO: 159 - DNA, 20 bp, Artificial sequence
  Synthetic oligonucleotide
gcccacccttaccatcgcca

SEQ ID NO: 160 - DNA, 20 bp, Artificial sequence
  Synthetic oligonucleotide
gtcaggagcctatgtctggg

SEQ ID NO: 161 - DNA, 20 bp, Artificial sequence
  Synthetic oligonucleotide
tggtccaccccagacgatcc

SEQ ID NO: 162 - DNA, 20 bp, Artificial sequence
  Synthetic oligonucleotide
caccctggatggtccaccct

SEQ ID NO: 163 - DNA, 20 bp, Artificial sequence
  Synthetic oligonucleotide
aagagggtccaccatggatg

SEQ ID NO: 164 - DNA, 20 bp, Artificial sequence
  Synthetic oligonucleotide
cccagacgatccaccccaga

SEQ ID NO: 165 - DNA, 20 bp, Artificial sequence
  Synthetic oligonucleotide
caccggtatcccagtgcccc

SEQ ID NO: 166 - DNA, 20 bp, Artificial sequence
  Synthetic oligonucleotide
cagacgcaccgtcacccacg

SEQ ID NO: 167 - DNA, 20 bp, Artificial sequence
  Synthetic oligonucleotide
cgtgtgcacacgcgccctgc

SEQ ID NO: 168 - DNA, 20 bp, Artificial sequence
  Synthetic oligonucleotide
ggcacacgccatacctgggc

SEQ ID NO: 169 - DNA, 20 bp, Artificial sequence
  Synthetic oligonucleotide
cccccatgccctactcggtc

SEQ ID NO: 170 - DNA, 20 bp, Artificial sequence
  Synthetic oligonucleotide
ggtgcctctaacatagacac

SEQ ID NO: 171 - DNA, 20 bp, Artificial sequence
  Synthetic oligonucleotide
acagctgtacccacaggcgg

SEQ ID NO: 172 - DNA, 20 bp, Artificial sequence
  Synthetic oligonucleotide
cgtctctgtatatgcctggc

SEQ ID NO: 173 - DNA, 20 bp, Artificial sequence
  Synthetic oligonucleotide
cgggttcgcccttactcatc

SEQ ID NO: 174 - DNA, 20 bp, Artificial sequence
  Synthetic oligonucleotide
gctgcccgtattcttcctga

SEQ ID NO: 175 - DNA, 20 bp, Artificial sequence
  Synthetic oligonucleotide
cgcaggcatcccactcatga

SEQ ID NO: 176 - DNA, 20 bp, Artificial sequence
  Synthetic oligonucleotide
tccggccttcctgaccattc

SEQ ID NO: 177 - DNA, 20 bp, Artificial sequence
  Synthetic oligonucleotide
ctggaggtagatgacccgct

SEQ ID NO: 178 - DNA, 20 bp, Artificial sequence
  Synthetic oligonucleotide
cggacccgacccgagggaga

SEQ ID NO: 179 - DNA, 20 bp, Artificial sequence
  Synthetic oligonucleotide
ccgcgccccgtcagggagtg

SEQ ID NO: 180 - DNA, 20 bp, Artificial sequence
  Synthetic oligonucleotide
gttggtgtagcccccgccgc

SEQ ID NO: 181 - DNA, 20 bp, Artificial sequence
  Synthetic oligonucleotide
gccggcggtgtccaggagcg

SEQ ID NO: 182 - DNA, 20 bp, Artificial sequence
  Synthetic oligonucleotide
acctcggagtccaggtcgct

SEQ ID NO: 183 - DNA, 20 bp, Artificial sequence
  Synthetic oligonucleotide
gagccgctccttgaaggtgt

SEQ ID NO: 184 - DNA, 20 bp, Artificial sequence
  Synthetic oligonucleotide
ggagtagttctgctttgggc

SEQ ID NO: 185 - DNA, 20 bp, Artificial sequence
  Synthetic oligonucleotide
tggatcgcccacagtgtcat

SEQ ID NO: 186 - DNA, 20 bp, Artificial sequence
  Synthetic oligonucleotide
cgaaggacacgcggaagatc

SEQ ID NO: 187 - DNA, 20 bp, Artificial sequence
  Synthetic oligonucleotide
tgaacaggttccgcagcggc

SEQ ID NO: 188 - DNA, 20 bp, Artificial sequence
  Synthetic oligonucleotide
gtcaccgtagcccacggtgg

SEQ ID NO: 189 - DNA, 20 bp, Artificial sequence
  Synthetic oligonucleotide
gacgagctcctcgaactgca

SEQ ID NO: 190 - DNA, 20 bp, Artificial sequence
  Synthetic oligonucleotide
gtgcttctccgtctgcgcac

SEQ ID NO: 191 - DNA, 20 bp, Artificial sequence
  Synthetic oligonucleotide
atgcgctgccactgctccgg

SEQ ID NO: 192 - DNA, 20 bp, Artificial sequence
  Synthetic oligonucleotide
ccgcttcagcccgatgaggc

SEQ ID NO: 193 - DNA, 20 bp, Artificial sequence
  Synthetic oligonucleotide
gagccgttctccgtgggcag

SEQ ID NO: 194 - DNA, 20 bp, Artificial sequence
  Synthetic oligonucleotide
tcggccagttccaggacggg

SEQ ID NO: 195 - DNA, 20 bp, Artificial sequence
  Synthetic oligonucleotide
gagggtagcccttcacatac

SEQ ID NO: 196 - DNA, 20 bp, Artificial sequence
  Synthetic oligonucleotide
ccgagacgatgatcagcttg

SEQ ID NO: 197 - DNA, 20 bp, Artificial sequence
  Synthetic oligonucleotide
gccgtctctgccgagacgat

SEQ ID NO: 198 - DNA, 20 bp, Artificial sequence
  Synthetic oligonucleotide
aagttgtacagcccattgcc

SEQ ID NO: 199 - DNA, 20 bp, Artificial sequence
  Synthetic oligonucleotide
ttcagctccttgcgggatct

SEQ ID NO: 200 - DNA, 20 bp, Artificial sequence
  Synthetic oligonucleotide
tgtagtccttcacgaaggac

SEQ ID NO: 201 - DNA, 20 bp, Artificial sequence
  Synthetic oligonucleotide
acaggtcgccctcggtgatt

SEQ ID NO: 202 - DNA, 20 bp, Artificial sequence
  Synthetic oligonucleotide
ccggcctgcctgcttgggcg

SEQ ID NO: 203 - DNA, 20 bp, Artificial sequence
  Synthetic oligonucleotide
gcgccggtacaggctgaggc

SEQ ID NO: 204 - DNA, 20 bp, Artificial sequence
  Synthetic oligonucleotide
ccaggtgcttcatgcggttc

SEQ ID NO: 205 - DNA, 20 bp, Artificial sequence
  Synthetic oligonucleotide
cgctagtgccaccgtgtcct

SEQ ID NO: 206 - DNA, 20 bp, Artificial sequence
  Synthetic oligonucleotide
ggccctccccccgcatgagg

SEQ ID NO: 207 - DNA, 20 bp, Artificial sequence
  Synthetic oligonucleotide
ggacgcacccctctcacatg

SEQ ID NO: 208 - DNA, 20 bp, Artificial sequence
  Synthetic oligonucleotide
gcccaatgccccctagatgc

SEQ ID NO: 209 - DNA, 20 bp, Artificial sequence
  Synthetic oligonucleotide
gcaccatcttccgcccaatg

SEQ ID NO: 210 - DNA, 20 bp, Artificial sequence
  Synthetic oligonucleotide
cgggatctcgccttgctgag

SEQ ID NO: 211 - DNA, 20 bp, Artificial sequence
  Synthetic oligonucleotide
gaccgtacaaaccagtaagg

SEQ ID NO: 212 - DNA, 20 bp, Artificial sequence
  Synthetic oligonucleotide
tacccgattcatgacatcac

SEQ ID NO: 213 - DNA, 20 bp, Artificial sequence
  Synthetic oligonucleotide
caggtttacccgattcatga

SEQ ID NO: 214 - DNA, 20 bp, Artificial sequence
  Synthetic oligonucleotide
cccttaaagaccatccgccc

SEQ ID NO: 215 - DNA, 20 bp, Artificial sequence
  Synthetic oligonucleotide
ctggcgggccccacacatcc

SEQ ID NO: 216 - DNA, 20 bp, Artificial sequence
  Synthetic oligonucleotide
atggattttcatcacggcct

SEQ ID NO: 217 - DNA, 20 bp, Artificial sequence
  Synthetic oligonucleotide
gcgcaccactcctccctgat

SEQ ID NO: 218 - DNA, 20 bp, Artificial sequence
  Synthetic oligonucleotide
cctgccgtaccctacacgct

SEQ ID NO: 219 - DNA, 20 bp, Artificial sequence
  Synthetic oligonucleotide
cggcacacaacccatgtgcc

SEQ ID NO: 220 - DNA, 20 bp, Artificial sequence
  Synthetic oligonucleotide
agcggcacttccaccttacc

SEQ ID NO: 221 - DNA, 20 bp, Artificial sequence
  Synthetic oligonucleotide
cccgactcctcctcgaacct

SEQ ID NO: 222 - DNA, 20 bp, Artificial sequence
  Synthetic oligonucleotide
gtggcattccatgttgaccc

SEQ ID NO: 223 - DNA, 20 bp, Artificial sequence
  Synthetic oligonucleotide
accgtgtttctacataagcc

SEQ ID NO: 224 - DNA, 20 bp, Artificial sequence
  Synthetic oligonucleotide
gctgttacatccgcagtgag

SEQ ID NO: 225 - DNA, 20 bp, Artificial sequence
  Synthetic oligonucleotide
ccgtgtatacctgtctcccc

SEQ ID NO: 226 - DNA, 20 bp, Artificial sequence
  Synthetic oligonucleotide
acaacaagatccaggcaccg

SEQ ID NO: 227 - DNA, 20 bp, Artificial sequence
  Synthetic oligonucleotide
ggaaggacaataccttcggc

SEQ ID NO: 228 - DNA, 20 bp, Artificial sequence
  Synthetic oligonucleotide
tgcccggctcaaaccaccgc

SEQ ID NO: 229 - DNA, 20 bp, Artificial sequence
  Synthetic oligonucleotide
cgcagcatccaaacccacgg

SEQ ID NO: 230 - DNA, 20 bp, Artificial sequence
  Synthetic oligonucleotide
cggcacacactatagcctcg

SEQ ID NO: 231 - DNA, 20 bp, Artificial sequence
  Synthetic oligonucleotide
tccgccctgaccatcgcccc

SEQ ID NO: 232 - DNA, 20 bp, Artificial sequence
  Synthetic oligonucleotide
ggctcctatcaatcgaatct

SEQ ID NO: 233 - DNA, 20 bp, Artificial sequence
  Synthetic oligonucleotide
ggacccttctccctacgctg

SEQ ID NO: 234 - DNA, 20 bp, Artificial sequence
  Synthetic oligonucleotide
tgggttccctacttactgag

SEQ ID NO: 235 - DNA, 20 bp, Artificial sequence
  Synthetic oligonucleotide
acacctgtgtctcggctgag

SEQ ID NO: 236 - DNA, 20 bp, Artificial sequence
  Synthetic oligonucleotide
gccaggtcccagatgctatc

SEQ ID NO: 237 - DNA, 20 bp, Artificial sequence
  Synthetic oligonucleotide
gcagcccacccttaccatcg

SEQ ID NO: 238 - DNA, 20 bp, Artificial sequence
  Synthetic oligonucleotide
ccggtcttccaggcactcgc

SEQ ID NO: 239 - DNA, 20 bp, Artificial sequence
  Synthetic oligonucleotide
atggtccaccccagacgatc

SEQ ID NO: 240 - DNA, 20 bp, Artificial sequence
  Synthetic oligonucleotide
atggtccaccccagatggtc

SEQ ID NO: 241 - DNA, 20 bp, Artificial sequence
  Synthetic oligonucleotide
caagagggtccaccatggat

SEQ ID NO: 242 - DNA, 20 bp, Artificial sequence
  Synthetic oligonucleotide
ccggacagtctaccccagac

SEQ ID NO: 243 - DNA, 20 bp, Artificial sequence
  Synthetic oligonucleotide
ccaccggtatcccagtgccc

SEQ ID NO: 244 - DNA, 20 bp, Artificial sequence
  Synthetic oligonucleotide
ccagacgcaccgtcacccac

SEQ ID NO: 245 - DNA, 20 bp, Artificial sequence
  Synthetic oligonucleotide
acacagctcgcctaactgcg

SEQ ID NO: 246 - DNA, 20 bp, Artificial sequence
  Synthetic oligonucleotide
gggcagagtgcctactgcgc

SEQ ID NO: 247 - DNA, 20 bp, Artificial sequence
  Synthetic oligonucleotide
cctcggcataacacatggcc

SEQ ID NO: 248 - DNA, 20 bp, Artificial sequence
  Synthetic oligonucleotide
gatcagacacccatgccggg

SEQ ID NO: 249 - DNA, 20 bp, Artificial sequence
  Synthetic oligonucleotide
tcggccggccacgccttact

SEQ ID NO: 250 - DNA, 20 bp, Artificial sequence
  Synthetic oligonucleotide
gactcctctcacacaccggg

SEQ ID NO: 251 - DNA, 20 bp, Artificial sequence
  Synthetic oligonucleotide
tccgggttcgcccttactca

SEQ ID NO: 252 - DNA, 20 bp, Artificial sequence
  Synthetic oligonucleotide
gtgaagctgcgatgttctgg

SEQ ID NO: 253 - DNA, 20 bp, Artificial sequence
  Synthetic oligonucleotide
acccgcttcctaaccctgca

SEQ ID NO: 254 - DNA, 20 bp, Artificial sequence
  Synthetic oligonucleotide
gagttctgtgccactgcggg

SEQ ID NO: 255 - DNA, 20 bp, Artificial sequence
  Synthetic oligonucleotide
tcggacccgacccgagggag

SEQ ID NO: 256 - DNA, 20 bp, Artificial sequence
  Synthetic oligonucleotide
tccgcgccccgtcagggagt

SEQ ID NO: 257 - DNA, 20 bp, Artificial sequence
  Synthetic oligonucleotide
caaactcgaaggtccggttg

SEQ ID NO: 258 - DNA, 20 bp, Artificial sequence
  Synthetic oligonucleotide
tcgctcatcttgaagccggc

SEQ ID NO: 259 - DNA, 20 bp, Artificial sequence
  Synthetic oligonucleotide
cacctcggagtccaggtcgc

SEQ ID NO: 260 - DNA, 20 bp, Artificial sequence
  Synthetic oligonucleotide
acagcttgagccgctccttg

SEQ ID NO: 261 - DNA, 20 bp, Artificial sequence
  Synthetic oligonucleotide
gacgagtcattgaaggagta

SEQ ID NO: 262 - DNA, 20 bp, Artificial sequence
  Synthetic oligonucleotide
ctggatcgcccacagtgtca

SEQ ID NO: 263 - DNA, 20 bp, Artificial sequence
  Synthetic oligonucleotide
ccaggacgaaggacacgcgg

SEQ ID NO: 264 - DNA, 20 bp, Artificial sequence
  Synthetic oligonucleotide
ccccgtgaaaacgaggcaca

SEQ ID NO: 265 - DNA, 20 bp, Artificial sequence
  Synthetic oligonucleotide
cgatggccagatcttgggcg

SEQ ID NO: 266 - DNA, 20 bp, Artificial sequence
  Synthetic oligonucleotide
agacgagctcctcgaactgc

SEQ ID NO: 267 - DNA, 20 bp, Artificial sequence
  Synthetic oligonucleotide
cgtgcttctccgtctgcgca

SEQ ID NO: 268 - DNA, 20 bp, Artificial sequence
  Synthetic oligonucleotide
ttcacggcccaggcgcgcag

SEQ ID NO: 269 - DNA, 20 bp, Artificial sequence
  Synthetic oligonucleotide
ttgctgtcacccatgcggat

SEQ ID NO: 270 - DNA, 20 bp, Artificial sequence
  Synthetic oligonucleotide
ccccgggttcagcaggatgc

SEQ ID NO: 271 - DNA, 20 bp, Artificial sequence
  Synthetic oligonucleotide
cgagccgttctccgtgggca

SEQ ID NO: 272 - DNA, 20 bp, Artificial sequence
  Synthetic oligonucleotide
tgtcggccagttccaggacg

SEQ ID NO: 273 - DNA, 20 bp, Artificial sequence
  Synthetic oligonucleotide
ggagggtagcccttcacata

SEQ ID NO: 274 - DNA, 20 bp, Artificial sequence
  Synthetic oligonucleotide
gccgagacgatgatcagctt

SEQ ID NO: 275 - DNA, 20 bp, Artificial sequence
  Synthetic oligonucleotide
cggccgtctctgccgagacg

SEQ ID NO: 276 - DNA, 20 bp, Artificial sequence
  Synthetic oligonucleotide
cacgatgaagttgtacagcc

SEQ ID NO: 277 - DNA, 20 bp, Artificial sequence
  Synthetic oligonucleotide
gtccgcatagatgatgccac

SEQ ID NO: 278 - DNA, 20 bp, Artificial sequence
  Synthetic oligonucleotide
atgtagtccttcacgaagga

SEQ ID NO: 279 - DNA, 20 bp, Artificial sequence
  Synthetic oligonucleotide
cggatccacaggtcgccctc

SEQ ID NO: 280 - DNA, 20 bp, Artificial sequence
  Synthetic oligonucleotide
ggctgatccactccgcggcc

SEQ ID NO: 281 - DNA, 20 bp, Artificial sequence
  Synthetic oligonucleotide
cggttcttcaccagctcgga

SEQ ID NO: 282 - DNA, 20 bp, Artificial sequence
  Synthetic oligonucleotide
gggtcggagcggatgagata

SEQ ID NO: 283 - DNA, 20 bp, Artificial sequence
  Synthetic oligonucleotide
gtcacgctagtgccaccgtg

SEQ ID NO: 284 - DNA, 20 bp, Artificial sequence
  Synthetic oligonucleotide
tggccctccccccgcatgag

SEQ ID NO: 285 - DNA, 20 bp, Artificial sequence
  Synthetic oligonucleotide
gggacgcacccctctcacat

SEQ ID NO: 286 - DNA, 20 bp, Artificial sequence
  Synthetic oligonucleotide
ccgcccaatgccccctagat

SEQ ID NO: 287 - DNA, 20 bp, Artificial sequence
  Synthetic oligonucleotide
tgcaccatcttccgcccaat

SEQ ID NO: 288 - DNA, 20 bp, Artificial sequence
  Synthetic oligonucleotide
ccgggatctcgccttgctga

SEQ ID NO: 289 - DNA, 20 bp, Artificial sequence
  Synthetic oligonucleotide
ctgaccgtacaaaccagtaa

SEQ ID NO: 290 - DNA, 20 bp, Artificial sequence
  Synthetic oligonucleotide
ttacccgattcatgacatca

SEQ ID NO: 291 - DNA, 20 bp, Artificial sequence
  Synthetic oligonucleotide
ccaggtttacccgattcatg

SEQ ID NO: 292 - DNA, 20 bp, Artificial sequence
  Synthetic oligonucleotide
ggttctgaccacgctgttgc

SEQ ID NO: 293 - DNA, 20 bp, Artificial sequence
  Synthetic oligonucleotide
aagatgcccatttaaccggg

SEQ ID NO: 294 - DNA, 20 bp, Artificial sequence
  Synthetic oligonucleotide
aacttggaacctctacctgg

SEQ ID NO: 295 - DNA, 20 bp, Artificial sequence
  Synthetic oligonucleotide
cctccgcgccccaagtcggg

SEQ ID NO: 296 - DNA, 20 bp, Artificial sequence
  Synthetic oligonucleotide
cctgaccattttcaacctcg

SEQ ID NO: 297 - DNA, 20 bp, Artificial sequence
  Synthetic oligonucleotide
tgtcctatagacaccaacac

SEQ ID NO: 298 - DNA, 20 bp, Artificial sequence
  Synthetic oligonucleotide
acgaagcttcctcttgcctg

SEQ ID NO: 299 - DNA, 20 bp, Artificial sequence
  Synthetic oligonucleotide
gacaccgttcacatgtgatg

SEQ ID NO: 300 - DNA, 20 bp, Artificial sequence
  Synthetic oligonucleotide
ccttcgggagccacacgctc

SEQ ID NO: 301 - DNA, 20 bp, Artificial sequence
  Synthetic oligonucleotide
gggtacggcctcatccaggt

SEQ ID NO: 302 - DNA, 20 bp, Artificial sequence
  Synthetic oligonucleotide
ggtggctgttacatccgcag

SEQ ID NO: 303 - DNA, 20 bp, Artificial sequence
  Synthetic oligonucleotide
gtaacgaaccaccaccagcc

SEQ ID NO: 304 - DNA, 20 bp, Artificial sequence
  Synthetic oligonucleotide
agcccacacgccatacagtt

SEQ ID NO: 305 - DNA, 20 bp, Artificial sequence
  Synthetic oligonucleotide
ctgcagggcccttcaccgcg

SEQ ID NO: 306 - DNA, 20 bp, Artificial sequence
  Synthetic oligonucleotide
cccgcgcgcccctacctctg

SEQ ID NO: 307 - DNA, 20 bp, Artificial sequence
  Synthetic oligonucleotide
cccgatatagccctagctga

SEQ ID NO: 308 - DNA, 20 bp, Artificial sequence
  Synthetic oligonucleotide
gccccgtccctacacggctg

SEQ ID NO: 309 - DNA, 20 bp, Artificial sequence
  Synthetic oligonucleotide
ggccactcctcctaggcggg

SEQ ID NO: 310 - DNA, 20 bp, Artificial sequence
  Synthetic oligonucleotide
agtcggctgccttagccctc

SEQ ID NO: 311 - DNA, 20 bp, Artificial sequence
  Synthetic oligonucleotide
agggtacatcccacatctgc

SEQ ID NO: 312 - DNA, 20 bp, Artificial sequence
  Synthetic oligonucleotide
acctggttttcccccacgga

SEQ ID NO: 313 - DNA, 20 bp, Artificial sequence
  Synthetic oligonucleotide
cacacctgtgtctcggctga

SEQ ID NO: 314 - DNA, 20 bp, Artificial sequence
  Synthetic oligonucleotide
cggcacagccagacaagcgc

SEQ ID NO: 315 - DNA, 20 bp, Artificial sequence
  Synthetic oligonucleotide
cggaggatacatatctgctg

SEQ ID NO: 316 - DNA, 20 bp, Artificial sequence
  Synthetic oligonucleotide
gggacttgccaagcagtcct

SEQ ID NO: 317 - DNA, 20 bp, Artificial sequence
  Synthetic oligonucleotide
ctgaatggtccaccccagac

SEQ ID NO: 318 - DNA, 20 bp, Artificial sequence
  Synthetic oligonucleotide
atccaccctggatggtccac

SEQ ID NO: 319 - DNA, 20 bp, Artificial sequence
  Synthetic oligonucleotide
cacccaagagggtccaccat

SEQ ID NO: 320 - DNA, 20 bp, Artificial sequence
  Synthetic oligonucleotide
ggaactctaccttcagcccg

SEQ ID NO: 321 - DNA, 20 bp, Artificial sequence
  Synthetic oligonucleotide
cagatacaccatcacccacg

SEQ ID NO: 322 - DNA, 20 bp, Artificial sequence
  Synthetic oligonucleotide
gccccagacgcaccgtcacc

SEQ ID NO: 323 - DNA, 20 bp, Artificial sequence
  Synthetic oligonucleotide
ggtggaccttccatcgctcc

SEQ ID NO: 324 - DNA, 20 bp, Artificial sequence
  Synthetic oligonucleotide
ggttggctgattctgggctc

SEQ ID NO: 325 - DNA, 20 bp, Artificial sequence
  Synthetic oligonucleotide
ggacttagccccatcagggc

SEQ ID NO: 326 - DNA, 20 bp, Artificial sequence
  Synthetic oligonucleotide
gtgacctgacaattgacccc

SEQ ID NO: 327 - DNA, 20 bp, Artificial sequence
  Synthetic oligonucleotide
gaccaactgaccatgccagg

SEQ ID NO: 328 - DNA, 20 bp, Artificial sequence
  Synthetic oligonucleotide
cggatgagcccttcctgagc

SEQ ID NO: 329 - DNA, 20 bp, Artificial sequence
  Synthetic oligonucleotide
gggtcattcttcagcggagg

SEQ ID NO: 330 - DNA, 20 bp, Artificial sequence
  Synthetic oligonucleotide
gtgtgcccttaccgtagccg

SEQ ID NO: 331 - DNA, 20 bp, Artificial sequence
  Synthetic oligonucleotide
aacccgcttcctaaccctgc

SEQ ID NO: 332 - DNA, 20 bp, Artificial sequence
  Synthetic oligonucleotide
tgcgactcccccatggtgcc

SEQ ID NO: 333 - DNA, 20 bp, Artificial sequence
  Synthetic oligonucleotide
agctcggacccgacccgagg

SEQ ID NO: 334 - DNA, 20 bp, Artificial sequence
  Synthetic oligonucleotide
gtccgcgccccgtcagggag

SEQ ID NO: 335 - DNA, 20 bp, Artificial sequence
  Synthetic oligonucleotide
cgtcaaactcgaaggtccgg

SEQ ID NO: 336 - DNA, 20 bp, Artificial sequence
  Synthetic oligonucleotide
gtcgctcatcttgaagccgg

SEQ ID NO: 337 - DNA, 20 bp, Artificial sequence
  Synthetic oligonucleotide
tagaactccacctggaccct

SEQ ID NO: 338 - DNA, 20 bp, Artificial sequence
  Synthetic oligonucleotide
gagaagttgaacagccggat

SEQ ID NO: 339 - DNA, 20 bp, Artificial sequence
  Synthetic oligonucleotide
ggaggacgagtcattgaagg

SEQ ID NO: 340 - DNA, 20 bp, Artificial sequence
  Synthetic oligonucleotide
acctggatcgcccacagtgt

SEQ ID NO: 341 - DNA, 20 bp, Artificial sequence
  Synthetic oligonucleotide
gatcatctccaggacgaagg

SEQ ID NO: 342 - DNA, 20 bp, Artificial sequence
  Synthetic oligonucleotide
gtgctggatgccgcaggtcc

SEQ ID NO: 343 - DNA, 20 bp, Artificial sequence
  Synthetic oligonucleotide
cacgcagatcatgatgacca

SEQ ID NO: 344 - DNA, 20 bp, Artificial sequence
  Synthetic oligonucleotide
ccagaggtagacgagctcct

SEQ ID NO: 345 - DNA, 20 bp, Artificial sequence
  Synthetic oligonucleotide
aaggtcgatcttgagggagc

SEQ ID NO: 346 - DNA, 20 bp, Artificial sequence
  Synthetic oligonucleotide
ccttcacggcccaggcgcgc

SEQ ID NO: 347 - DNA, 20 bp, Artificial sequence
  Synthetic oligonucleotide
tcgcggaagaacttgctgtc

SEQ ID NO: 348 - DNA, 20 bp, Artificial sequence
  Synthetic oligonucleotide
cgagttctcctccttggtga

SEQ ID NO: 349 - DNA, 20 bp, Artificial sequence
  Synthetic oligonucleotide
cgccggctgcccgagccgtt

SEQ ID NO: 350 - DNA, 20 bp, Artificial sequence
  Synthetic oligonucleotide
agctgtcggccagttccagg

SEQ ID NO: 351 - DNA, 20 bp, Artificial sequence
  Synthetic oligonucleotide
ttcttgaacccgtaggcctt

SEQ ID NO: 352 - DNA, 20 bp, Artificial sequence
  Synthetic oligonucleotide
tgccgagacgatgatcagct

SEQ ID NO: 353 - DNA, 20 bp, Artificial sequence
  Synthetic oligonucleotide
ttgccggccgtctctgccga

SEQ ID NO: 354 - DNA, 20 bp, Artificial sequence
  Synthetic oligonucleotide
cagtggcacgatgaagttgt

SEQ ID NO: 355 - DNA, 20 bp, Artificial sequence
  Synthetic oligonucleotide
ccaggttgtccgcatagatg

SEQ ID NO: 356 - DNA, 20 bp, Artificial sequence
  Synthetic oligonucleotide
tcatgtagtccttcacgaag

SEQ ID NO: 357 - DNA, 20 bp, Artificial sequence
  Synthetic oligonucleotide
gtgcggatccacaggtcgcc

SEQ ID NO: 358 - DNA, 20 bp, Artificial sequence
  Synthetic oligonucleotide
tggctgatccactccgcggc

SEQ ID NO: 359 - DNA, 20 bp, Artificial sequence
  Synthetic oligonucleotide
gcggttcttcaccagctcgg

SEQ ID NO: 360 - DNA, 20 bp, Artificial sequence
  Synthetic oligonucleotide
ttgcaggacgacagcttgtg

SEQ ID NO: 361 - DNA, 20 bp, Artificial sequence
  Synthetic oligonucleotide
ccagggtcacgctagtgcca

SEQ ID NO: 362 - DNA, 20 bp, Artificial sequence
  Synthetic oligonucleotide
gttgcggtacatctgtgtaa

SEQ ID NO: 363 - DNA, 20 bp, Artificial sequence
  Synthetic oligonucleotide
ccttcagaaaggtcctcggc

SEQ ID NO: 364 - DNA, 20 bp, Artificial sequence
  Synthetic oligonucleotide
atcttccgcccaatgccccc

SEQ ID NO: 365 - DNA, 20 bp, Artificial sequence
  Synthetic oligonucleotide
atgcaccatcttccgcccaa

SEQ ID NO: 366 - DNA, 20 bp, Artificial sequence
  Synthetic oligonucleotide
gcccgggatctcgccttgct

SEQ ID NO: 367 - DNA, 20 bp, Artificial sequence
  Synthetic oligonucleotide
gctgaccgtacaaaccagta

SEQ ID NO: 368 - DNA, 20 bp, Artificial sequence
  Synthetic oligonucleotide
tttacccgattcatgacatc

SEQ ID NO: 369 - DNA, 20 bp, Artificial sequence
  Synthetic oligonucleotide
ccccagatcgccagcccgtc

SEQ ID NO: 370 - DNA, 20 bp, Artificial sequence
  Synthetic oligonucleotide
gcaccaagacctatggactc

SEQ ID NO: 371 - DNA, 20 bp, Artificial sequence
  Synthetic oligonucleotide
ggcgacggtgccaaggagga

SEQ ID NO: 372 - DNA, 20 bp, Artificial sequence
  Synthetic oligonucleotide
gagcgcatcactattttctc

SEQ ID NO: 373 - DNA, 20 bp, Artificial sequence
  Synthetic oligonucleotide
tgggctcatcctgttggtcc

SEQ ID NO: 374 - DNA, 20 bp, Artificial sequence
  Synthetic oligonucleotide
tagaatattccattccccgc

SEQ ID NO: 375 - DNA, 20 bp, Artificial sequence
  Synthetic oligonucleotide
ctcatcctatagacaccaac

SEQ ID NO: 376 - DNA, 20 bp, Artificial sequence
  Synthetic oligonucleotide
acttccccgaccagctgaga

SEQ ID NO: 377 - DNA, 20 bp, Artificial sequence
  Synthetic oligonucleotide
gcgggattcgccctctcagg

SEQ ID NO: 378 - DNA, 20 bp, Artificial sequence
  Synthetic oligonucleotide
ccctcgccgaccactggcct

SEQ ID NO: 379 - DNA, 20 bp, Artificial sequence
  Synthetic oligonucleotide
caggttctacctaccaaggg

SEQ ID NO: 380 - DNA, 20 bp, Artificial sequence
  Synthetic oligonucleotide
atcaccataaccagacccgg

SEQ ID NO: 381 - DNA, 20 bp, Artificial sequence
  Synthetic oligonucleotide
tgcaacattttcaagcctcg

SEQ ID NO: 382 - DNA, 20 bp, Artificial sequence
  Synthetic oligonucleotide
gcaatggaagccacactcga

SEQ ID NO: 383 - DNA, 20 bp, Artificial sequence
  Synthetic oligonucleotide
gcgctcccgatacctgccct

SEQ ID NO: 384 - DNA, 20 bp, Artificial sequence
  Synthetic oligonucleotide
ttgaccttagcctcaaccgc

SEQ ID NO: 385 - DNA, 20 bp, Artificial sequence
  Synthetic oligonucleotide
tcggcctacgccaggctctc

SEQ ID NO: 386 - DNA, 20 bp, Artificial sequence
  Synthetic oligonucleotide
gggcgcagccacacactcgc

SEQ ID NO: 387 - DNA, 20 bp, Artificial sequence
  Synthetic oligonucleotide
gggtgacttcccaactggct

SEQ ID NO: 388 - DNA, 20 bp, Artificial sequence
  Synthetic oligonucleotide
tggctcacctaccgtggcca

SEQ ID NO: 389 - DNA, 20 bp, Artificial sequence
  Synthetic oligonucleotide
gggctaacccccacatcaga

SEQ ID NO: 390 - DNA, 20 bp, Artificial sequence
  Synthetic oligonucleotide
ctgtgaggtgccatcccggg

SEQ ID NO: 391 - DNA, 20 bp, Artificial sequence
  Synthetic oligonucleotide
tctcggctgaggcccacggg

SEQ ID NO: 392 - DNA, 20 bp, Artificial sequence
  Synthetic oligonucleotide
ggtgagatttacggattggg

SEQ ID NO: 393 - DNA, 20 bp, Artificial sequence
  Synthetic oligonucleotide
acaatctcccccaaagcggc

SEQ ID NO: 394 - DNA, 20 bp, Artificial sequence
  Synthetic oligonucleotide
cccggacgatccaccctgga

SEQ ID NO: 395 - DNA, 20 bp, Artificial sequence
  Synthetic oligonucleotide
cctgaatggtccaccccaga

SEQ ID NO: 396 - DNA, 20 bp, Artificial sequence
  Synthetic oligonucleotide
caccctagacaatccaccct

SEQ ID NO: 397 - DNA, 20 bp, Artificial sequence
  Synthetic oligonucleotide
tccacccaagagggtccacc

SEQ ID NO: 398 - DNA, 20 bp, Artificial sequence
  Synthetic oligonucleotide
atggcctacgcccttgccct

SEQ ID NO: 399 - DNA, 20 bp, Artificial sequence
  Synthetic oligonucleotide
tgccccagacgcaccgtcac

SEQ ID NO: 400 - DNA, 20 bp, Artificial sequence
  Synthetic oligonucleotide
acgcgccctgccccagacgc

SEQ ID NO: 401 - DNA, 20 bp, Artificial sequence
  Synthetic oligonucleotide
gacctcaaccccctacttgg

SEQ ID NO: 402 - DNA, 20 bp, Artificial sequence
  Synthetic oligonucleotide
cggcgagttcccagagctca

SEQ ID NO: 403 - DNA, 20 bp, Artificial sequence
  Synthetic oligonucleotide
ccgttcttcccttaaccacc

SEQ ID NO: 404 - DNA, 20 bp, Artificial sequence
  Synthetic oligonucleotide
ccggccacagattataaccc

SEQ ID NO: 405 - DNA, 20 bp, Artificial sequence
  Synthetic oligonucleotide
ggagttctgaccaactgacc

SEQ ID NO: 406 - DNA, 20 bp, Artificial sequence
  Synthetic oligonucleotide
gcatccagaattccagccgt

SEQ ID NO: 407 - DNA, 20 bp, Artificial sequence
  Synthetic oligonucleotide
gctcgccacccctcatgcat

SEQ ID NO: 408 - DNA, 20 bp, Artificial sequence
  Synthetic oligonucleotide
gccgtgtgcccttaccgtag

SEQ ID NO: 409 - DNA, 20 bp, Artificial sequence
  Synthetic oligonucleotide
tgctcgccccccaacccgct

SEQ ID NO: 410 - DNA, 20 bp, Artificial sequence
  Synthetic oligonucleotide
gggaggattcacaggccgct

SEQ ID NO: 411 - DNA, 20 bp, Artificial sequence
  Synthetic oligonucleotide
cagctcggacccgacccgag

SEQ ID NO: 412 - DNA, 20 bp, Artificial sequence
  Synthetic oligonucleotide
gtagcccccgccgcgcgcct

SEQ ID NO: 413 - DNA, 20 bp, Artificial sequence
  Synthetic oligonucleotide
gcgcgccgtcccccgcgcag

SEQ ID NO: 414 - DNA, 20 bp, Artificial sequence
  Synthetic oligonucleotide
aggtcgctcatcttgaagcc

SEQ ID NO: 415 - DNA, 20 bp, Artificial sequence
  Synthetic oligonucleotide
gtagaactccacctggaccc

SEQ ID NO: 416 - DNA, 20 bp, Artificial sequence
  Synthetic oligonucleotide
gacgcgcacaatgtagagca

SEQ ID NO: 417 - DNA, 20 bp, Artificial sequence
  Synthetic oligonucleotide
ccagttgatctcggaggacg

SEQ ID NO: 418 - DNA, 20 bp, Artificial sequence
  Synthetic oligonucleotide
ttatggccacgatgacctgg

SEQ ID NO: 419 - DNA, 20 bp, Artificial sequence
  Synthetic oligonucleotide
ttgatcatctccaggacgaa

SEQ ID NO: 420 - DNA, 20 bp, Artificial sequence
  Synthetic oligonucleotide
ttctcgcccgcccgctccag

SEQ ID NO: 421 - DNA, 20 bp, Artificial sequence
  Synthetic oligonucleotide
ccacgcagatcatgatgacc

SEQ ID NO: 422 - DNA, 20 bp, Artificial sequence
  Synthetic oligonucleotide
ccgctccatccagaggtaga

SEQ ID NO: 423 - DNA, 20 bp, Artificial sequence
  Synthetic oligonucleotide
tgagaaggtcgatcttgagg

SEQ ID NO: 424 - DNA, 20 bp, Artificial sequence
  Synthetic oligonucleotide
tccttcacggcccaggcgcg

SEQ ID NO: 425 - DNA, 20 bp, Artificial sequence
  Synthetic oligonucleotide
actcgcggaagaacttgctg

SEQ ID NO: 426 - DNA, 20 bp, Artificial sequence
  Synthetic oligonucleotide
ccgagttctcctccttggtg

SEQ ID NO: 427 - DNA, 20 bp, Artificial sequence
  Synthetic oligonucleotide
ccgccggctgcccgagccgt

SEQ ID NO: 428 - DNA, 20 bp, Artificial sequence
  Synthetic oligonucleotide
cctcatcctccgactggtcg

SEQ ID NO: 429 - DNA, 20 bp, Artificial sequence
  Synthetic oligonucleotide
gttcttgaacccgtaggcct

SEQ ID NO: 430 - DNA, 20 bp, Artificial sequence
  Synthetic oligonucleotide
ctgccgagacgatgatcagc

SEQ ID NO: 431 - DNA, 20 bp, Artificial sequence
  Synthetic oligonucleotide
ttgtacagcccattgccggc

SEQ ID NO: 432 - DNA, 20 bp, Artificial sequence
  Synthetic oligonucleotide
gcagtggcacgatgaagttg

SEQ ID NO: 433 - DNA, 20 bp, Artificial sequence
  Synthetic oligonucleotide
cggcggcgaacggcaggcgg

SEQ ID NO: 434 - DNA, 20 bp, Artificial sequence
  Synthetic oligonucleotide
cagccgggtgatggtgatca

SEQ ID NO: 435 - DNA, 20 bp, Artificial sequence
  Synthetic oligonucleotide
cgtgcggatccacaggtcgc

SEQ ID NO: 436 - DNA, 20 bp, Artificial sequence
  Synthetic oligonucleotide
gctggctgatccactccgcg

SEQ ID NO: 437 - DNA, 20 bp, Artificial sequence
  Synthetic oligonucleotide
tgcggttcttcaccagctcg

SEQ ID NO: 438 - DNA, 20 bp, Artificial sequence
  Synthetic oligonucleotide
accgtgtcctcacacgctcc

SEQ ID NO: 439 - DNA, 20 bp, Artificial sequence
  Synthetic oligonucleotide
ccccagggtcacgctagtgc

SEQ ID NO: 440 - DNA, 20 bp, Artificial sequence
  Synthetic oligonucleotide
agttgcggtacatctgtgta

SEQ ID NO: 441 - DNA, 20 bp, Artificial sequence
  Synthetic oligonucleotide
ggacagttcagtgtgaagta

SEQ ID NO: 442 - DNA, 20 bp, Artificial sequence
  Synthetic oligonucleotide
catcttccgcccaatgcccc

SEQ ID NO: 443 - DNA, 20 bp, Artificial sequence
  Synthetic oligonucleotide
gaaatgcaccatcttccgcc

SEQ ID NO: 444 - DNA, 20 bp, Artificial sequence
  Synthetic oligonucleotide
agccgccgcccgggatctcg

SEQ ID NO: 445 - DNA, 20 bp, Artificial sequence
  Synthetic oligonucleotide
cgctgaccgtacaaaccagt

SEQ ID NO: 446 - DNA, 20 bp, Artificial sequence
  Synthetic oligonucleotide
gtttacccgattcatgacat

SEQ ID NO: 447 - DNA, 20 bp, Artificial sequence
  Synthetic oligonucleotide
ggagaactgcgatttctgtc

SEQ ID NO: 448 - DNA, 20 bp, Artificial sequence
  Synthetic oligonucleotide
cccctctgaaccatagcacc

SEQ ID NO: 449 - DNA, 20 bp, Artificial sequence
  Synthetic oligonucleotide
aatgaccaactcactggcgc

SEQ ID NO: 450 - DNA, 20 bp, Artificial sequence
  Synthetic oligonucleotide
cgcgggagccccaaacccac

SEQ ID NO: 451 - DNA, 20 bp, Artificial sequence
  Synthetic oligonucleotide
agcggatgaattattcccat

SEQ ID NO: 452 - DNA, 20 bp, Artificial sequence
  Synthetic oligonucleotide
gtagaatattccattccccg

SEQ ID NO: 453 - DNA, 20 bp, Artificial sequence
  Synthetic oligonucleotide
tgtcccatcctatagacacc

SEQ ID NO: 454 - DNA, 20 bp, Artificial sequence
  Synthetic oligonucleotide
cactcacgccttcacgcaga

SEQ ID NO: 455 - DNA, 20 bp, Artificial sequence
  Synthetic oligonucleotide
tggtggcttcctgacgcgga

SEQ ID NO: 456 - DNA, 20 bp, Artificial sequence
  Synthetic oligonucleotide
cagactggccacgcccctcg

SEQ ID NO: 457 - DNA, 20 bp, Artificial sequence
  Synthetic oligonucleotide
cactcgcctttttagagccc

SEQ ID NO: 458 - DNA, 20 bp, Artificial sequence
  Synthetic oligonucleotide
tctcagattcacaatcccgg

SEQ ID NO: 459 - DNA, 20 bp, Artificial sequence
  Synthetic oligonucleotide
ccccctcgccacgcatggtt

SEQ ID NO: 460 - DNA, 20 bp, Artificial sequence
  Synthetic oligonucleotide
gccggaatcctcacccttag

SEQ ID NO: 461 - DNA, 20 bp, Artificial sequence
  Synthetic oligonucleotide
ccggcccgccccaaactcac

SEQ ID NO: 462 - DNA, 20 bp, Artificial sequence
  Synthetic oligonucleotide
cgtgagatccacactccaga

SEQ ID NO: 463 - DNA, 20 bp, Artificial sequence
  Synthetic oligonucleotide
ggtgacaaccacactcgagg

SEQ ID NO: 464 - DNA, 20 bp, Artificial sequence
  Synthetic oligonucleotide
gggaacatcgccattcccag

SEQ ID NO: 465 - DNA, 20 bp, Artificial sequence
  Synthetic oligonucleotide
ccaccgggccctaaaagcat

SEQ ID NO: 466 - DNA, 20 bp, Artificial sequence
  Synthetic oligonucleotide
ttcgccatcgccaggcttgc

SEQ ID NO: 467 - DNA, 20 bp, Artificial sequence
  Synthetic oligonucleotide
cgcctggctattgggagctg

SEQ ID NO: 468 - DNA, 20 bp, Artificial sequence
  Synthetic oligonucleotide
gccccggcttacaatcatgt

SEQ ID NO: 469 - DNA, 20 bp, Artificial sequence
  Synthetic oligonucleotide
gtctcggctgaggcccacgg

SEQ ID NO: 470 - DNA, 20 bp, Artificial sequence
  Synthetic oligonucleotide
atggccatacccatcgatgc

SEQ ID NO: 471 - DNA, 20 bp, Artificial sequence
  Synthetic oligonucleotide
aagcagccccagggattgcg

SEQ ID NO: 472 - DNA, 20 bp, Artificial sequence
  Synthetic oligonucleotide
caccccggacgatccaccct

SEQ ID NO: 473 - DNA, 20 bp, Artificial sequence
  Synthetic oligonucleotide
accctgaatggtccacccca

SEQ ID NO: 474 - DNA, 20 bp, Artificial sequence
  Synthetic oligonucleotide
gagatccatcccagatggtt

SEQ ID NO: 475 - DNA, 20 bp, Artificial sequence
  Synthetic oligonucleotide
gtccacccaagagggtccac

SEQ ID NO: 476 - DNA, 20 bp, Artificial sequence
  Synthetic oligonucleotide
ggtggagaccccacctaggt

SEQ ID NO: 477 - DNA, 20 bp, Artificial sequence
  Synthetic oligonucleotide
ctgccccagacgcaccgtca

SEQ ID NO: 478 - DNA, 20 bp, Artificial sequence
  Synthetic oligonucleotide
cacgcgccctgccccagacg

SEQ ID NO: 479 - DNA, 20 bp, Artificial sequence
  Synthetic oligonucleotide
ccggccttacttcttgtggg

SEQ ID NO: 480 - DNA, 20 bp, Artificial sequence
  Synthetic oligonucleotide
gcactcactctaccacggag

SEQ ID NO: 481 - DNA, 20 bp, Artificial sequence
  Synthetic oligonucleotide
gtagcccttcacatacctgg

SEQ ID NO: 482 - DNA, 20 bp, Artificial sequence
  Synthetic oligonucleotide
gtggttcattccagactgga

SEQ ID NO: 483 - DNA, 20 bp, Artificial sequence
  Synthetic oligonucleotide
gtcccttgtcaatacaagga

SEQ ID NO: 484 - DNA, 20 bp, Artificial sequence
  Synthetic oligonucleotide
tcgcccttactcatcagtgg

SEQ ID NO: 485 - DNA, 20 bp, Artificial sequence
  Synthetic oligonucleotide
aggtccataccccaccggcc

SEQ ID NO: 486 - DNA, 20 bp, Artificial sequence
  Synthetic oligonucleotide
ggtccccaccagtcttgttc

SEQ ID NO: 487 - DNA, 20 bp, Artificial sequence
  Synthetic oligonucleotide
tccgacctttactccaggcc

SEQ ID NO: 488 - DNA, 20 bp, Artificial sequence
  Synthetic oligonucleotide
cgggtgctccctaaacctgg

SEQ ID NO: 489 - DNA, 20 bp, Artificial sequence
  Synthetic oligonucleotide
acagcacgccaagaccgcta

SEQ ID NO: 490 - DNA, 20 bp, Artificial sequence
  Synthetic oligonucleotide
cgtgccccaccctcaccttt

SEQ ID NO: 491 - DNA, 20 bp, Artificial sequence
  Synthetic oligonucleotide
actggcagaatcatcagtaa

SEQ ID NO: 492 - DNA, 20 bp, Artificial sequence
  Synthetic oligonucleotide
agcgaacttaattatatctc

SEQ ID NO: 493 - DNA, 20 bp, Artificial sequence
  Synthetic oligonucleotide
caccccagacgatccaccct

SEQ ID NO: 494 - DNA, 20 bp, Artificial sequence
  Synthetic oligonucleotide
ccacactccactccaaggca

SEQ ID NO: 495 - DNA, 20 bp, Artificial sequence
  Synthetic oligonucleotide
ctcccatcctatacacacca

SEQ ID NO: 496 - DNA, 20 bp, Artificial sequence
  Synthetic oligonucleotide
cgccattcccagagtccaca

SEQ ID NO: 497 - DNA, 20 bp, Artificial sequence
  Synthetic oligonucleotide
gccttgccacacaaaacagt

SEQ ID NO: 498 - DNA, 20 bp, Artificial sequence
  Synthetic oligonucleotide
agcacatcctggccttgccc

SEQ ID NO: 499 - DNA, 20 bp, Artificial sequence
  Synthetic oligonucleotide
ggttctgccctcttctgacc

SEQ ID NO: 500 - DNA, 20 bp, Artificial sequence
  Synthetic oligonucleotide
gactcacccaaccctaccat

SEQ ID NO: 501 - DNA, 20 bp, Artificial sequence
  Synthetic oligonucleotide
ccacacgcaacaaaggcacc

SEQ ID NO: 502 - DNA, 20 bp, Artificial sequence
  Synthetic oligonucleotide
gatgacggtcccatgctgat

SEQ ID NO: 503 - DNA, 20 bp, Artificial sequence
  Synthetic oligonucleotide
ctctcacacctctaagagcc

SEQ ID NO: 504 - DNA, 20 bp, Artificial sequence
  Synthetic oligonucleotide
gcgaggccacccatgtgaaa

SEQ ID NO: 505 - DNA, 20 bp, Artificial sequence
  Synthetic oligonucleotide
agctgaaccacccacagaga

SEQ ID NO: 506 - DNA, 20 bp, Artificial sequence
  Synthetic oligonucleotide
caccgtgtaacaacacccca

SEQ ID NO: 507 - DNA, 20 bp, Artificial sequence
  Synthetic oligonucleotide
accgcaaccccttctgcttg

SEQ ID NO: 508 - DNA, 20 bp, Artificial sequence
  Synthetic oligonucleotide
ctgccgttttcaagaattaa

SEQ ID NO: 509 - DNA, 20 bp, Artificial sequence
  Synthetic oligonucleotide
acccttagccctcatcagga

SEQ ID NO: 510 - DNA, 20 bp, Artificial sequence
  Synthetic oligonucleotide
gactctagttacaaacatga

SEQ ID NO: 511 - DNA, 20 bp, Artificial sequence
  Synthetic oligonucleotide
acgatccattttcccctgca

SEQ ID NO: 512 - DNA, 20 bp, Artificial sequence
  Synthetic oligonucleotide
agagggagtcctatcattca

SEQ ID NO: 513 - DNA, 20 bp, Artificial sequence
  Synthetic oligonucleotide
cctggtgccacacctccctt

SEQ ID NO: 514 - DNA, 20 bp, Artificial sequence
  Synthetic oligonucleotide
cctccatgcacccgtgccac

SEQ ID NO: 515 - DNA, 20 bp, Artificial sequence
  Synthetic oligonucleotide
tcacgggactccatcattac

SEQ ID NO: 516 - DNA, 20 bp, Artificial sequence
  Synthetic oligonucleotide
cggacacacaacatacgcaa

SEQ ID NO: 517 - DNA, 20 bp, Artificial sequence
  Synthetic oligonucleotide
gttttaagcacaccatcccg

SEQ ID NO: 518 - DNA, 20 bp, Artificial sequence
  Synthetic oligonucleotide
cttcatagcaacccatgcct

SEQ ID NO: 519 - DNA, 20 bp, Artificial sequence
  Synthetic oligonucleotide
caccctggacagtctaccct

SEQ ID NO: 520 - DNA, 20 bp, Artificial sequence
  Synthetic oligonucleotide
gaaagccacacacaactggc

SEQ ID NO: 521 - DNA, 20 bp, Artificial sequence
  Synthetic oligonucleotide
ggcaggccccttccctctca

SEQ ID NO: 522 - DNA, 20 bp, Artificial sequence
  Synthetic oligonucleotide
gtacatcccacatctgcggg

SEQ ID NO: 523 - DNA, 20 bp, Artificial sequence
  Synthetic oligonucleotide
ggcataaacacacttacacc

SEQ ID NO: 524 - DNA, 20 bp, Artificial sequence
  Synthetic oligonucleotide
cccccgacatacacagcatc

SEQ ID NO: 525 - DNA, 20 bp, Artificial sequence
  Synthetic oligonucleotide
accagcccaagcatacccca

SEQ ID NO: 526 - DNA, 20 bp, Artificial sequence
  Synthetic oligonucleotide
ggagtactctccacagaccc

SEQ ID NO: 527 - DNA, 20 bp, Artificial sequence
  Synthetic oligonucleotide
ggaggtcccctccgtggccg

SEQ ID NO: 528 - DNA, 20 bp, Artificial sequence
  Synthetic oligonucleotide
gcccatggcttcatcaacgg

SEQ ID NO: 529 - DNA, 20 bp, Artificial sequence
  Synthetic oligonucleotide
gaacacagaatcctgtgaac

SEQ ID NO: 530 - DNA, 20 bp, Artificial sequence
  Synthetic oligonucleotide
gggacccttctccctacgct

SEQ ID NO: 531 - DNA, 20 bp, Artificial sequence
  Synthetic oligonucleotide
ccctgccccagacgcaccgt

SEQ ID NO: 532 - DNA, 20 bp, Artificial sequence
  Synthetic oligonucleotide
ttgaccccaccccagaggca

SEQ ID NO: 533 - DNA, 20 bp, Artificial sequence
  Synthetic oligonucleotide
acccagtcatgaactaggtc

SEQ ID NO: 534 - DNA, 20 bp, Artificial sequence
  Synthetic oligonucleotide
gcccctgttctattttgagc

SEQ ID NO: 535 - DNA, 20 bp, Artificial sequence
  Synthetic oligonucleotide
tctactctgcccaaggccct

SEQ ID NO: 536 - DNA, 20 bp, Artificial sequence
  Synthetic oligonucleotide
gtgtcctcacacgctcctcc

SEQ ID NO: 537 - DNA, 20 bp, Artificial sequence
  Synthetic oligonucleotide
ccttgcagaattcttgcagc

SEQ ID NO: 538 - DNA, 20 bp, Artificial sequence
  Synthetic oligonucleotide
tagcaaagctgatctagccc

SEQ ID NO: 539 - DNA, 20 bp, Artificial sequence
  Synthetic oligonucleotide
agacgcatccatttcctcca

SEQ ID NO: 540 - DNA, 20 bp, Artificial sequence
  Synthetic oligonucleotide
ggcactggctcctatcaatc

SEQ ID NO: 541 - DNA, 20 bp, Artificial sequence
  Synthetic oligonucleotide
gggcttttcccaggcaggcc

SEQ ID NO: 542 - DNA, 20 bp, Artificial sequence
  Synthetic oligonucleotide
taatcagctcccaatccctc

SEQ ID NO: 543 - DNA, 20 bp, Artificial sequence
  Synthetic oligonucleotide
ctgtgtccacacctgcggga

SEQ ID NO: 544 - DNA, 20 bp, Artificial sequence
  Synthetic oligonucleotide
cttcatgcctccagaatgca

SEQ ID NO: 545 - DNA, 20 bp, Artificial sequence
  Synthetic oligonucleotide
tgaagattcctccccgcagc

SEQ ID NO: 546 - DNA, 20 bp, Artificial sequence
  Synthetic oligonucleotide
accagaccccagaatctcct

SEQ ID NO: 547 - DNA, 20 bp, Artificial sequence
  Synthetic oligonucleotide
accagcagcatccttaataa

SEQ ID NO: 548 - DNA, 20 bp, Artificial sequence
  Synthetic oligonucleotide
cagcccggccttacttcttg

SEQ ID NO: 549 - DNA, 20 bp, Artificial sequence
  Synthetic oligonucleotide
cccaggcaaaccgcccagca

SEQ ID NO: 550 - DNA, 20 bp, Artificial sequence
  Synthetic oligonucleotide
gacctttactccaggcctca

SEQ ID NO: 551 - DNA, 20 bp, Artificial sequence
  Synthetic oligonucleotide
acgaaggtcaccatccacct

SEQ ID NO: 552 - DNA, 20 bp, Artificial sequence
  Synthetic oligonucleotide
ttggacaccatcccgggcct

SEQ ID NO: 553 - DNA, 20 bp, Artificial sequence
  Synthetic oligonucleotide
cagagtgcagaacagcagcc

SEQ ID NO: 554 - DNA, 20 bp, Artificial sequence
  Synthetic oligonucleotide
gccctgttctctgaagcaac

SEQ ID NO: 555 - DNA, 20 bp, Artificial sequence
  Synthetic oligonucleotide
atcactgtcccaatcacccc

SEQ ID NO: 556 - DNA, 20 bp, Artificial sequence
  Synthetic oligonucleotide
tccatggaaatgcaccatct

SEQ ID NO: 557 - DNA, 20 bp, Artificial sequence
  Synthetic oligonucleotide
gggccagtccccttctctac

SEQ ID NO: 558 - DNA, 20 bp, Artificial sequence
  Synthetic oligonucleotide
caagagaacatctgtgccgt

SEQ ID NO: 559 - DNA, 20 bp, Artificial sequence
  Synthetic oligonucleotide
cagtagggcaccacagccac

SEQ ID NO: 560 - DNA, 20 bp, Artificial sequence
  Synthetic oligonucleotide
gtgaggtgccatcccgggca

SEQ ID NO: 561 - DNA, 20 bp, Artificial sequence
  Synthetic oligonucleotide
ggcggtacatccacgggctc

SEQ ID NO: 562 - DNA, 20 bp, Artificial sequence
  Synthetic oligonucleotide
ggtgccttcctttgccgtaa

SEQ ID NO: 563 - DNA, 20 bp, Artificial sequence
  Synthetic oligonucleotide
cttccaccttacccagacct

SEQ ID NO: 564 - DNA, 20 bp, Artificial sequence
  Synthetic oligonucleotide
gtggtccccctcgccacgca

SEQ ID NO: 565 - DNA, 20 bp, Artificial sequence
  Synthetic oligonucleotide
agacccctcaccaaacatcc

SEQ ID NO: 566 - DNA, 20 bp, Artificial sequence
  Synthetic oligonucleotide
cggcaggtccctgacaggca

SEQ ID NO: 567 - DNA, 20 bp, Artificial sequence
  Synthetic oligonucleotide
ttcatagcaacccatgccta

SEQ ID NO: 568 - DNA, 20 bp, Artificial sequence
  Synthetic oligonucleotide
gtagggcaccacagccacta

SEQ ID NO: 569 - DNA, 20 bp, Artificial sequence
  Synthetic oligonucleotide
gagacgggcttccttgcatc

SEQ ID NO: 570 - DNA, 20 bp, Artificial sequence
  Synthetic oligonucleotide
gcatctgtatcccctcgccc

SEQ ID NO: 571 - DNA, 20 bp, Artificial sequence
  Synthetic oligonucleotide
tcctgtgaacttcctcccct

SEQ ID NO: 572 - DNA, 20 bp, Artificial sequence
  Synthetic oligonucleotide
cactggctcctatcaatcga

SEQ ID NO: 573 - DNA, 20 bp, Artificial sequence
  Synthetic oligonucleotide
agatggtccaccccacatga

SEQ ID NO: 574 - DNA, 20 bp, Artificial sequence
  Synthetic oligonucleotide
ccagggctgacccttggact

SEQ ID NO: 575 - DNA, 20 bp, Artificial sequence
  Synthetic oligonucleotide
ggacacacaacatacgcaac

SEQ ID NO: 576 - DNA, 20 bp, Artificial sequence
  Synthetic oligonucleotide
ccatgggcctccacctgctc

SEQ ID NO: 577 - DNA, 20 bp, Artificial sequence
  Synthetic oligonucleotide
aaggtcaccatccacctggc

SEQ ID NO: 578 - DNA, 20 bp, Artificial sequence
  Synthetic oligonucleotide
cagcacggcctccccgagct

SEQ ID NO: 579 - DNA, 20 bp, Artificial sequence
  Synthetic oligonucleotide
agtctgggccctccaggccg

SEQ ID NO: 580 - DNA, 20 bp, Artificial sequence
  Synthetic oligonucleotide
acacaccaacaccacagggc

SEQ ID NO: 581 - DNA, 20 bp, Artificial sequence
  Synthetic oligonucleotide
cccctgttctattttgagcc

SEQ ID NO: 582 - DNA, 20 bp, Artificial sequence
  Synthetic oligonucleotide
ccagacgatccaccctaaat

SEQ ID NO: 583 - DNA, 20 bp, Artificial sequence
  Synthetic oligonucleotide
cccaccctcacctttgggtc

SEQ ID NO: 584 - DNA, 20 bp, Artificial sequence
  Synthetic oligonucleotide
cctttactccaggcctcagt

SEQ ID NO: 585 - DNA, 20 bp, Artificial sequence
  Synthetic oligonucleotide
gagtactctccacagacccc

SEQ ID NO: 586 - DNA, 20 bp, Artificial sequence
  Synthetic oligonucleotide
tggtgccacacctcccttca

SEQ ID NO: 587 - DNA, 20 bp, Artificial sequence
  Synthetic oligonucleotide
actggaaaccatccacagat

SEQ ID NO: 588 - DNA, 20 bp, Artificial sequence
  Synthetic oligonucleotide
ttctgccctcttctgaccta

SEQ ID NO: 589 - DNA, 20 bp, Artificial sequence
  Synthetic oligonucleotide
cacaggtgctactcacacaa

SEQ ID NO: 590 - DNA, 20 bp, Artificial sequence
  Synthetic oligonucleotide
ttcatgcctccagaatgcat

SEQ ID NO: 591 - DNA, 20 bp, Artificial sequence
  Synthetic oligonucleotide
ccgttttcaagaattaacca

SEQ ID NO: 592 - DNA, 20 bp, Artificial sequence
  Synthetic oligonucleotide
gaggaagccaccacctgtca

SEQ ID NO: 593 - DNA, 20 bp, Artificial sequence
  Synthetic oligonucleotide
tgtgtcctgaccattttcaa

SEQ ID NO: 594 - DNA, 20 bp, Artificial sequence
  Synthetic oligonucleotide
caaaggcacccccttatctc

SEQ ID NO: 595 - DNA, 20 bp, Artificial sequence
  Synthetic oligonucleotide
gagagaagcctctctctgtt

SEQ ID NO: 596 - DNA, 20 bp, Artificial sequence
  Synthetic oligonucleotide
acttggccccaaacctaggc

SEQ ID NO: 597 - DNA, 20 bp, Artificial sequence
  Synthetic oligonucleotide
aagccacacacaactggctt

SEQ ID NO: 598 - DNA, 20 bp, Artificial sequence
  Synthetic oligonucleotide
actaggtcacccacccagga

SEQ ID NO: 599 - DNA, 20 bp, Artificial sequence
  Synthetic oligonucleotide
tacatcccacatctgcggga

SEQ ID NO: 600 - DNA, 20 bp, Artificial sequence
  Synthetic oligonucleotide
aagctgatctagcccaggtc

SEQ ID NO: 601 - DNA, 20 bp, Artificial sequence
  Synthetic oligonucleotide
ccttgccacacaaaacagtt

SEQ ID NO: 602 - DNA, 20 bp, Artificial sequence
  Synthetic oligonucleotide
ccgtggccaactctcgggtc

SEQ ID NO: 603 - DNA, 20 bp, Artificial sequence
  Synthetic oligonucleotide
tcccagagtccacacccggc

SEQ ID NO: 604 - DNA, 20 bp, Artificial sequence
  Synthetic oligonucleotide
tggctttttccatcctggga

SEQ ID NO: 605 - DNA, 20 bp, Artificial sequence
  Synthetic oligonucleotide
gcatcctgccccagacgcac

SEQ ID NO: 606 - DNA, 20 bp, Artificial sequence
  Synthetic oligonucleotide
gctacagctcccatgctgca

SEQ ID NO: 607 - DNA, 20 bp, Artificial sequence
  Synthetic oligonucleotide
gaaccacccacagagaggcc

SEQ ID NO: 608 - DNA, 20 bp, Artificial sequence
  Synthetic oligonucleotide
tgtgtccacacctgcgggat

SEQ ID NO: 609 - DNA, 20 bp, Artificial sequence
  Synthetic oligonucleotide
tggaaatgcaccatcttccg

SEQ ID NO: 610 - DNA, 20 bp, Artificial sequence
  Synthetic oligonucleotide
ggcttcggcctcactcacct

SEQ ID NO: 611 - DNA, 20 bp, Artificial sequence
  Synthetic oligonucleotide
gggcaggcactcactttgta

SEQ ID NO: 612 - DNA, 20 bp, Artificial sequence
  Synthetic oligonucleotide
cccgggcctttcctgctcca

SEQ ID NO: 613 - DNA, 20 bp, Artificial sequence
  Synthetic oligonucleotide
gaagccgcacctccactgcc

SEQ ID NO: 614 - DNA, 20 bp, Artificial sequence
  Synthetic oligonucleotide
tttaagcacaccatcccgga

SEQ ID NO: 615 - DNA, 20 bp, Artificial sequence
  Synthetic oligonucleotide
cacactccactccaaggcaa

SEQ ID NO: 616 - DNA, 20 bp, Artificial sequence
  Synthetic oligonucleotide
gctgagggtcccaaacccag

SEQ ID NO: 617 - DNA, 20 bp, Artificial sequence
  Synthetic oligonucleotide
cggccttacttcttgtgggc

SEQ ID NO: 618 - DNA, 20 bp, Artificial sequence
  Synthetic oligonucleotide
gacgcatccatttcctccac

SEQ ID NO: 619 - DNA, 20 bp, Artificial sequence
  Synthetic oligonucleotide
aggatcttcgcaacttgctg

SEQ ID NO: 620 - DNA, 20 bp, Artificial sequence
  Synthetic oligonucleotide
ccctcaccaaacatcccccg

SEQ ID NO: 621 - DNA, 20 bp, Artificial sequence
  Synthetic oligonucleotide
atttggcccaccacacacgg

SEQ ID NO: 622 - DNA, 20 bp, Artificial sequence
  Synthetic oligonucleotide
agccctgatccctcttgcaa

SEQ ID NO: 623 - DNA, 20 bp, Artificial sequence
  Synthetic oligonucleotide
agagtgcagaacagcagccc

SEQ ID NO: 624 - DNA, 20 bp, Artificial sequence
  Synthetic oligonucleotide
tcactgtcccaatcaccccc

SEQ ID NO: 625 - DNA, 20 bp, Artificial sequence
  Synthetic oligonucleotide
aatcagctcccaatccctcc

SEQ ID NO: 626 - DNA, 20 bp, Artificial sequence
  Synthetic oligonucleotide
tgacggtcccatgctgatca

SEQ ID NO: 627 - DNA, 20 bp, Artificial sequence
  Synthetic oligonucleotide
gcgatctgtcttcacgagtc

SEQ ID NO: 628 - DNA, 20 bp, Artificial sequence
  Synthetic oligonucleotide
ctggcagaatcatcagtaac

SEQ ID NO: 629 - DNA, 20 bp, Artificial sequence
  Synthetic oligonucleotide
gcgaacttaattatatctcc

SEQ ID NO: 630 - DNA, 20 bp, Artificial sequence
  Synthetic oligonucleotide
cccatggcttcatcaacgga

SEQ ID NO: 631 - DNA, 20 bp, Artificial sequence
  Synthetic oligonucleotide
gcagtggttatactgaacct

SEQ ID NO: 632 - DNA, 20 bp, Artificial sequence
  Synthetic oligonucleotide
ctaagagcccttgtctgcca

SEQ ID NO: 633 - DNA, 20 bp, Artificial sequence
  Synthetic oligonucleotide
acctgagacacccccatggc

SEQ ID NO: 634 - DNA, 20 bp, Artificial sequence
  Synthetic oligonucleotide
ggctgttacatccgcagtga

SEQ ID NO: 635 - DNA, 20 bp, Artificial sequence
  Synthetic oligonucleotide
tctgaagcaaccccccagct

SEQ ID NO: 636 - DNA, 20 bp, Artificial sequence
  Synthetic oligonucleotide
gaagcaagcccctttgggca

SEQ ID NO: 637 - DNA, 20 bp, Artificial sequence
  Synthetic oligonucleotide
acgggactccatcattaccc

SEQ ID NO: 638 - DNA, 20 bp, Artificial sequence
  Synthetic oligonucleotide
ggagtgagtcccagtggtta

SEQ ID NO: 639 - DNA, 20 bp, Artificial sequence
  Synthetic oligonucleotide
agggagtcctatcattcaga

SEQ ID NO: 640 - DNA, 20 bp, Artificial sequence
  Synthetic oligonucleotide
gccgccagccttaccttgtc

SEQ ID NO: 641 - DNA, 20 bp, Artificial sequence
  Synthetic oligonucleotide
aaacacacttacacccattc

SEQ ID NO: 642 - DNA, 20 bp, Artificial sequence
  Synthetic oligonucleotide
ccagcagcatccttaataat

SEQ ID NO: 643 - DNA, 20 bp, Artificial sequence
  Synthetic oligonucleotide
cactgtcccaatcaccccca

SEQ ID NO: 644 - DNA, 20 bp, Artificial sequence
  Synthetic oligonucleotide
tccctcctgtcctatacaca

SEQ ID NO: 645 - DNA, 20 bp, Artificial sequence
  Synthetic oligonucleotide
ccaggaagcttattatggcc

SEQ ID NO: 646 - DNA, 20 bp, Artificial sequence
  Synthetic oligonucleotide
ggtagccccaacccaacagc

SEQ ID NO: 647 - DNA, 20 bp, Artificial sequence
  Synthetic oligonucleotide
gacggcctgacacctgcccc

SEQ ID NO: 648 - DNA, 20 bp, Artificial sequence
  Synthetic oligonucleotide
ccgctggctcttttctgccc

SEQ ID NO: 649 - DNA, 20 bp, Artificial sequence
  Synthetic oligonucleotide
tggttatactgaacctgttt

SEQ ID NO: 650 - DNA, 20 bp, Artificial sequence
  Synthetic oligonucleotide
aaatgcaccatcttccgccc

SEQ ID NO: 651 - DNA, 20 bp, Artificial sequence
  Synthetic oligonucleotide
tcatgcctccagaatgcatc

SEQ ID NO: 652 - DNA, 20 bp, Artificial sequence
  Synthetic oligonucleotide
gccctcttctgacctagaca

SEQ ID NO: 653 - DNA, 20 bp, Artificial sequence
  Synthetic oligonucleotide
gacgatccaccctaaatggt

SEQ ID NO: 654 - DNA, 20 bp, Artificial sequence
  Synthetic oligonucleotide
ccacagacccctccttctga

SEQ ID NO: 655 - DNA, 20 bp, Artificial sequence
  Synthetic oligonucleotide
ggctttttccatcctgggac

SEQ ID NO: 656 - DNA, 20 bp, Artificial sequence
  Synthetic oligonucleotide
ccctgttctattttgagcct

SEQ ID NO: 657 - DNA, 20 bp, Artificial sequence
  Synthetic oligonucleotide
ctgaagcaaccccccagctt

SEQ ID NO: 658 - DNA, 20 bp, Artificial sequence
  Synthetic oligonucleotide
ccaccctcacctttgggtca

SEQ ID NO: 659 - DNA, 20 bp, Artificial sequence
  Synthetic oligonucleotide
ggcgcagccacacactcgcc

SEQ ID NO: 660 - DNA, 20 bp, Artificial sequence
  Synthetic oligonucleotide
ggtgccacacctcccttcaa

SEQ ID NO: 661 - DNA, 20 bp, Artificial sequence
  Synthetic oligonucleotide
gggagtcctatcattcagaa

SEQ ID NO: 662 - DNA, 20 bp, Artificial sequence
  Synthetic oligonucleotide
aacacacttacacccattcc

SEQ ID NO: 663 - DNA, 20 bp, Artificial sequence
  Synthetic oligonucleotide
tggcagagcatctcactgac

SEQ ID NO: 664 - DNA, 20 bp, Artificial sequence
  Synthetic oligonucleotide
ctgttgttctcccctccgct

SEQ ID NO: 665 - DNA, 20 bp, Artificial sequence
  Synthetic oligonucleotide
ctacagctcccatgctgcac

SEQ ID NO: 666 - DNA, 20 bp, Artificial sequence
  Synthetic oligonucleotide
gtggtttgctttcctgatct

SEQ ID NO: 667 - DNA, 20 bp, Artificial sequence
  Synthetic oligonucleotide
ggcctgtgcactctccaccc

SEQ ID NO: 668 - DNA, 20 bp, Artificial sequence
  Synthetic oligonucleotide
tgcagcacccataagtgggc

SEQ ID NO: 669 - DNA, 20 bp, Artificial sequence
  Synthetic oligonucleotide
gccgcacctccactgccaca

SEQ ID NO: 670 - DNA, 20 bp, Artificial sequence
  Synthetic oligonucleotide
gcctgggcagccataaagcc

SEQ ID NO: 671 - DNA, 20 bp, Artificial sequence
  Synthetic oligonucleotide
cgtggccaactctcgggtca

SEQ ID NO: 672 - DNA, 20 bp, Artificial sequence
  Synthetic oligonucleotide
acgcatccatttcctccaca

SEQ ID NO: 673 - DNA, 20 bp, Artificial sequence
  Synthetic oligonucleotide
cctcaccaaacatcccccgt

SEQ ID NO: 674 - DNA, 20 bp, Artificial sequence
  Synthetic oligonucleotide
acactccactccaaggcaac

SEQ ID NO: 675 - DNA, 20 bp, Artificial sequence
  Synthetic oligonucleotide
ccggaggtccgaaatcccaa

SEQ ID NO: 676 - DNA, 20 bp, Artificial sequence
  Synthetic oligonucleotide
ccgccagccttaccttgtcc

SEQ ID NO: 677 - DNA, 20 bp, Artificial sequence
  Synthetic oligonucleotide
gagagcctcccagccacgca

SEQ ID NO: 678 - DNA, 20 bp, Artificial sequence
  Synthetic oligonucleotide
catctgtatcccctcgcccg

SEQ ID NO: 679 - DNA, 20 bp, Artificial sequence
  Synthetic oligonucleotide
gatgagcttctctccacgcc

SEQ ID NO: 680 - DNA, 20 bp, Artificial sequence
  Synthetic oligonucleotide
gtgagacctcttgattgccc

SEQ ID NO: 681 - DNA, 20 bp, Artificial sequence
  Synthetic oligonucleotide
tctgctcgccccccaacccg

SEQ ID NO: 682 - DNA, 20 bp, Artificial sequence
  Synthetic oligonucleotide
agacagttcctcccttgcaa

SEQ ID NO: 683 - DNA, 20 bp, Artificial sequence
  Synthetic oligonucleotide
cctgtgaacttcctcccctt

SEQ ID NO: 684 - DNA, 20 bp, Artificial sequence
  Synthetic oligonucleotide
ccttgcatctctcactgggc

SEQ ID NO: 685 - DNA, 20 bp, Artificial sequence
  Synthetic oligonucleotide
actggctcctatcaatcgaa

SEQ ID NO: 686 - DNA, 20 bp, Artificial sequence
  Synthetic oligonucleotide
aaccacccacagagaggcca

SEQ ID NO: 687 - DNA, 20 bp, Artificial sequence
  Synthetic oligonucleotide
atcctgccccagacgcaccg

SEQ ID NO: 688 - DNA, 20 bp, Artificial sequence
  Synthetic oligonucleotide
ccgggcctttcctgctccaa

SEQ ID NO: 689 - DNA, 20 bp, Artificial sequence
  Synthetic oligonucleotide
tggtccaccccacatgatct

SEQ ID NO: 690 - DNA, 20 bp, Artificial sequence
  Synthetic oligonucleotide
tcatagcaacccatgcctat

SEQ ID NO: 691 - DNA, 20 bp, Artificial sequence
  Synthetic oligonucleotide
gtcccatgctgatcaagttc

SEQ ID NO: 692 - DNA, 20 bp, Artificial sequence
  Synthetic oligonucleotide
ggcagaatcatcagtaacaa

SEQ ID NO: 693 - DNA, 20 bp, Artificial sequence
  Synthetic oligonucleotide
acaactggcttcttctagaa

SEQ ID NO: 694 - DNA, 20 bp, Artificial sequence
  Synthetic oligonucleotide
acacaataccactcagacac

SEQ ID NO: 695 - DNA, 20 bp, Artificial sequence
  Synthetic oligonucleotide
acaggtgctactcacacaat

SEQ ID NO: 696 - DNA, 20 bp, Artificial sequence
  Synthetic oligonucleotide
cttggccccaaacctaggcc

SEQ ID NO: 697 - DNA, 20 bp, Artificial sequence
  Synthetic oligonucleotide
cctgagacacccccatggcc

SEQ ID NO: 698 - DNA, 20 bp, Artificial sequence
  Synthetic oligonucleotide
tgtgggtcacacaggacagg

SEQ ID NO: 699 - DNA, 20 bp, Artificial sequence
  Synthetic oligonucleotide
cgaacttaattatatctccc

SEQ ID NO: 700 - DNA, 20 bp, Artificial sequence
  Synthetic oligonucleotide
gccactgcgacctcattccg

SEQ ID NO: 701 - DNA, 20 bp, Artificial sequence
  Synthetic oligonucleotide
aggagattccttctagggta

SEQ ID NO: 702 - DNA, 20 bp, Artificial sequence
  Synthetic oligonucleotide
cttctgcacccattcctgct

SEQ ID NO: 703 - DNA, 20 bp, Artificial sequence
  Synthetic oligonucleotide
cgcccatacatgcgctgcca

SEQ ID NO: 704 - DNA, 20 bp, Artificial sequence
  Synthetic oligonucleotide
ggcaccacagccactagtgt

SEQ ID NO: 705 - DNA, 20 bp, Artificial sequence
  Synthetic oligonucleotide
aaggcacccccttatctcgg

SEQ ID NO: 706 - DNA, 20 bp, Artificial sequence
  Synthetic oligonucleotide
tgtcctgaccattttcaacc

SEQ ID NO: 707 - DNA, 20 bp, Artificial sequence
  Synthetic oligonucleotide
tcaggacaccgcaagtgctc

SEQ ID NO: 708 - DNA, 20 bp, Artificial sequence
  Synthetic oligonucleotide
cgggactccatcattaccca

SEQ ID NO: 709 - DNA, 20 bp, Artificial sequence
  Synthetic oligonucleotide
aacagtttccacagctggga

SEQ ID NO: 710 - DNA, 20 bp, Artificial sequence
  Synthetic oligonucleotide
cctgtctcccccaaagtggc

SEQ ID NO: 711 - DNA, 20 bp, Artificial sequence
  Synthetic oligonucleotide
ctgagggtcccaaacccagc

SEQ ID NO: 712 - DNA, 20 bp, Artificial sequence
  Synthetic oligonucleotide
tgtcagatgtcccacagcct

SEQ ID NO: 713 - DNA, 20 bp, Artificial sequence
  Synthetic oligonucleotide
ttggcccaccacacacggca

SEQ ID NO: 714 - DNA, 20 bp, Artificial sequence
  Synthetic oligonucleotide
atgtttgtcacagaaagtcc

SEQ ID NO: 715 - DNA, 20 bp, Artificial sequence
  Synthetic oligonucleotide
cgatctgtcttcacgagtca

SEQ ID NO: 716 - DNA, 20 bp, Artificial sequence
  Synthetic oligonucleotide
gccctgatccctcttgcaaa

SEQ ID NO: 717 - DNA, 20 bp, Artificial sequence
  Synthetic oligonucleotide
gagtgcagaacagcagccct

SEQ ID NO: 718 - DNA, 20 bp, Artificial sequence
  Synthetic oligonucleotide
aagcaagcccctttgggcaa

SEQ ID NO: 719 - DNA, 20 bp, Artificial sequence
  Synthetic oligonucleotide
ttcttcagcacccatgctga

SEQ ID NO: 720 - DNA, 20 bp, Artificial sequence
  Synthetic oligonucleotide
cgtgtatgccatctccacct

SEQ ID NO: 721 - DNA, 20 bp, Artificial sequence
  Synthetic oligonucleotide
aacttaattatatctcccgt

SEQ ID NO: 722 - DNA, 20 bp, Artificial sequence
  Synthetic oligonucleotide
cgctggctcttttctgcccc

SEQ ID NO: 723 - DNA, 20 bp, Artificial sequence
  Synthetic oligonucleotide
tgctcaagactccagggcga

SEQ ID NO: 724 - DNA, 20 bp, Artificial sequence
  Synthetic oligonucleotide
gaaggacaataccttcggca

SEQ ID NO: 725 - DNA, 20 bp, Artificial sequence
  Synthetic oligonucleotide
ccttgactaatcactgtgga

SEQ ID NO: 726 - DNA, 20 bp, Artificial sequence
  Synthetic oligonucleotide
gtagaggatccacccaggga

SEQ ID NO: 727 - DNA, 20 bp, Artificial sequence
  Synthetic oligonucleotide
caggaagcttattatggcca

SEQ ID NO: 728 - DNA, 20 bp, Artificial sequence
  Synthetic oligonucleotide
ccactccaaggcaacaccca

SEQ ID NO: 729 - DNA, 20 bp, Artificial sequence
  Synthetic oligonucleotide
agggtagcccttcacatacc

SEQ ID NO: 730 - DNA, 20 bp, Artificial sequence
  Synthetic oligonucleotide
gcagacaaagaacccggcca

SEQ ID NO: 731 - DNA, 20 bp, Artificial sequence
  Synthetic oligonucleotide
ccactgcgacctcattccgc

SEQ ID NO: 732 - DNA, 20 bp, Artificial sequence
  Synthetic oligonucleotide
gtcatgtgtccaccacacgc

SEQ ID NO: 733 - DNA, 20 bp, Artificial sequence
  Synthetic oligonucleotide
tggtttgctttcctgatctc

SEQ ID NO: 734 - DNA, 20 bp, Artificial sequence
  Synthetic oligonucleotide
ttctgcacccattcctgctc

SEQ ID NO: 735 - DNA, 20 bp, Artificial sequence
  Synthetic oligonucleotide
ggtgctactcacacaatgtc

SEQ ID NO: 736 - DNA, 20 bp, Artificial sequence
  Synthetic oligonucleotide
tgcaaagcacttactgagac

SEQ ID NO: 737 - DNA, 20 bp, Artificial sequence
  Synthetic oligonucleotide
gggcacggcttctatctcac

SEQ ID NO: 738 - DNA, 20 bp, Artificial sequence
  Synthetic oligonucleotide
gtcctcagcactcactgaac

SEQ ID NO: 739 - DNA, 20 bp, Artificial sequence
  Synthetic oligonucleotide
gctttttccatcctgggaca

SEQ ID NO: 740 - DNA, 20 bp, Artificial sequence
  Synthetic oligonucleotide
ccctgatccctcttgcaaac

SEQ ID NO: 741 - DNA, 20 bp, Artificial sequence
  Synthetic oligonucleotide
ctggctcctatcaatcgaat

SEQ ID NO: 742 - DNA, 20 bp, Artificial sequence
  Synthetic oligonucleotide
caagtgctcagaacatgccg

SEQ ID NO: 743 - DNA, 20 bp, Artificial sequence
  Synthetic oligonucleotide
agcaaccccccagcttgtcc

SEQ ID NO: 744 - DNA, 20 bp, Artificial sequence
  Synthetic oligonucleotide
tcctgctccaataaaccaga

SEQ ID NO: 745 - DNA, 20 bp, Artificial sequence
  Synthetic oligonucleotide
caccacagccactagtgtcc

SEQ ID NO: 746 - DNA, 20 bp, Artificial sequence
  Synthetic oligonucleotide
gggactccatcattacccac

SEQ ID NO: 747 - DNA, 20 bp, Artificial sequence
  Synthetic oligonucleotide
ttggccccaaacctaggcca

SEQ ID NO: 748 - DNA, 20 bp, Artificial sequence
  Synthetic oligonucleotide
ggcccaagcctccttgctgc

SEQ ID NO: 749 - DNA, 20 bp, Artificial sequence
  Synthetic oligonucleotide
ccccagacgcaccgtcaccc

SEQ ID NO: 750 - DNA, 20 bp, Artificial sequence
  Synthetic oligonucleotide
gacacggcacttcccgggac

SEQ ID NO: 751 - DNA, 20 bp, Artificial sequence
  Synthetic oligonucleotide
gcagccataaagcctgccta

SEQ ID NO: 752 - DNA, 20 bp, Artificial sequence
  Synthetic oligonucleotide
gcttgtcccactcagggcct

SEQ ID NO: 753 - DNA, 20 bp, Artificial sequence
  Synthetic oligonucleotide
tgagacacccccatggccaa

SEQ ID NO: 754 - DNA, 20 bp, Artificial sequence
  Synthetic oligonucleotide
catgcctccagaatgcatcc

SEQ ID NO: 755 - DNA, 20 bp, Artificial sequence
  Synthetic oligonucleotide
tcattgtgaaatcccatgcc

SEQ ID NO: 756 - DNA, 20 bp, Artificial sequence
  Synthetic oligonucleotide
gcgcagccacacactcgcca

SEQ ID NO: 757 - DNA, 20 bp, Artificial sequence
  Synthetic oligonucleotide
tccacggaactccatgggtc

SEQ ID NO: 758 - DNA, 20 bp, Artificial sequence
  Synthetic oligonucleotide
gtactaagagctactggcca

SEQ ID NO: 759 - DNA, 20 bp, Artificial sequence
  Synthetic oligonucleotide
aatgcaccatcttccgccca

SEQ ID NO: 760 - DNA, 20 bp, Artificial sequence
  Synthetic oligonucleotide
gctgagccgccatcatgctc

SEQ ID NO: 761 - DNA, 20 bp, Artificial sequence
  Synthetic oligonucleotide
ctgctcgccccccaacccgc

SEQ ID NO: 762 - DNA, 20 bp, Artificial sequence
  Synthetic oligonucleotide
acggcctgacacctgcccct

SEQ ID NO: 763 - DNA, 20 bp, Artificial sequence
  Synthetic oligonucleotide
acacacttacacccattcca

SEQ ID NO: 764 - DNA, 20 bp, Artificial sequence
  Synthetic oligonucleotide
ctcgggtcattcttcagcgg

SEQ ID NO: 765 - DNA, 20 bp, Artificial sequence
  Synthetic oligonucleotide
atgccaggcccccttgtgac

SEQ ID NO: 766 - DNA, 20 bp, Artificial sequence
  Synthetic oligonucleotide
agggagataaactaaactct

SEQ ID NO: 767 - DNA, 20 bp, Artificial sequence
  Synthetic oligonucleotide
gcagcacccataagtgggca

SEQ ID NO: 768 - DNA, 20 bp, Artificial sequence
  Synthetic oligonucleotide
caactggcttcttctagaac

SEQ ID NO: 769 - DNA, 20 bp, Artificial sequence
  Synthetic oligonucleotide
ggccacacccttcctcctga

SEQ ID NO: 770 - DNA, 20 bp, Artificial sequence
  Synthetic oligonucleotide
tgatcaagttctaatgggaa

SEQ ID NO: 771 - DNA, 20 bp, Artificial sequence
  Synthetic oligonucleotide
tggcatggatcccctcccta

SEQ ID NO: 772 - DNA, 20 bp, Artificial sequence
  Synthetic oligonucleotide
cctatggtatccacagaccc

SEQ ID NO: 773 - DNA, 20 bp, Artificial sequence
  Synthetic oligonucleotide
gtcctgaccattttcaacct

SEQ ID NO: 774 - DNA, 20 bp, Artificial sequence
  Synthetic oligonucleotide
gtagccccaacccaacagca

SEQ ID NO: 775 - DNA, 20 bp, Artificial sequence
  Synthetic oligonucleotide
ggcacccccttatctcgggc

SEQ ID NO: 776 - DNA, 20 bp, Artificial sequence
  Synthetic oligonucleotide
gaagagaaacccttcaggcc

SEQ ID NO: 777 - DNA, 20 bp, Artificial sequence
  Synthetic oligonucleotide
gagggtcccaaacccagcaa

SEQ ID NO: 778 - DNA, 20 bp, Artificial sequence
  Synthetic oligonucleotide
ccacagtcccagcccccgga

SEQ ID NO: 779 - DNA, 20 bp, Artificial sequence
  Synthetic oligonucleotide
atgagcttctctccacgcca

SEQ ID NO: 780 - DNA, 20 bp, Artificial sequence
  Synthetic oligonucleotide
ccagacacacatcacatatc

SEQ ID NO: 781 - DNA, 20 bp, Artificial sequence
  Synthetic oligonucleotide
tccctcccgtcctatagaca

SEQ ID NO: 782 - DNA, 20 bp, Artificial sequence
  Synthetic oligonucleotide
cgcacctccactgccacaga

SEQ ID NO: 783 - DNA, 20 bp, Artificial sequence
  Synthetic oligonucleotide
gcgctggcaccaacaagatc

SEQ ID NO: 784 - DNA, 20 bp, Artificial sequence
  Synthetic oligonucleotide
ctgtgaacttcctccccttc

SEQ ID NO: 785 - DNA, 20 bp, Artificial sequence
  Synthetic oligonucleotide
ggtggaaacttctgcaggac

SEQ ID NO: 786 - DNA, 20 bp, Artificial sequence
  Synthetic oligonucleotide
atctgtatcccctcgcccgg

SEQ ID NO: 787 - DNA, 20 bp, Artificial sequence
  Synthetic oligonucleotide
tacagctcccatgctgcact

SEQ ID NO: 788 - DNA, 20 bp, Artificial sequence
  Synthetic oligonucleotide
cgttgccctcccagccagcc

SEQ ID NO: 789 - DNA, 20 bp, Artificial sequence
  Synthetic oligonucleotide
tcaccaaacatcccccgtga

SEQ ID NO: 790 - DNA, 20 bp, Artificial sequence
  Synthetic oligonucleotide
attttgagcctccctagaac

SEQ ID NO: 791 - DNA, 20 bp, Artificial sequence
  Synthetic oligonucleotide
acgatccaccctaaatggtc

SEQ ID NO: 792 - DNA, 20 bp, Artificial sequence
  Synthetic oligonucleotide
cttgcatctctcactgggct

SEQ ID NO: 793 - DNA, 20 bp, Artificial sequence
  Synthetic oligonucleotide
tgttgttctcccctccgctc

SEQ ID NO: 794 - DNA, 20 bp, Artificial sequence
  Synthetic oligonucleotide
gaggtccgaaatcccaagcc

SEQ ID NO: 795 - DNA, 20 bp, Artificial sequence
  Synthetic oligonucleotide
ggtccaccccacatgatcta

SEQ ID NO: 796 - DNA, 20 bp, Artificial sequence
  Synthetic oligonucleotide
ggagtcctatcattcagaac

SEQ ID NO: 797 - DNA, 20 bp, Artificial sequence
  Synthetic oligonucleotide
tctgccccacatagaaacca

SEQ ID NO: 798 - DNA, 20 bp, Artificial sequence
  Synthetic oligonucleotide
ctatcattcagaacagggac

SEQ ID NO: 799 - DNA, 20 bp, Artificial sequence
  Synthetic oligonucleotide
gcaaagcacttactgagaca

SEQ ID NO: 800 - DNA, 20 bp, Artificial sequence
  Synthetic oligonucleotide
gcacggcttctatctcacac

SEQ ID NO: 801 - DNA, 20 bp, Artificial sequence
  Synthetic oligonucleotide
gactccatcattacccacca

SEQ ID NO: 802 - DNA, 20 bp, Artificial sequence
  Synthetic oligonucleotide
ggcatggatcccctccctat

SEQ ID NO: 803 - DNA, 20 bp, Artificial sequence
  Synthetic oligonucleotide
cccgtgaacacccagccgtt

SEQ ID NO: 804 - DNA, 20 bp, Artificial sequence
  Synthetic oligonucleotide
cctgctccaataaaccagac

SEQ ID NO: 805 - DNA, 20 bp, Artificial sequence
  Synthetic oligonucleotide
aactggcttcttctagaaca

SEQ ID NO: 806 - DNA, 20 bp, Artificial sequence
  Synthetic oligonucleotide
ggctgccccagaacctccga

SEQ ID NO: 807 - DNA, 20 bp, Artificial sequence
  Synthetic oligonucleotide
ggctgggaactcacaattct

SEQ ID NO: 808 - DNA, 20 bp, Artificial sequence
  Synthetic oligonucleotide
cattgtgaaatcccatgcca

SEQ ID NO: 809 - DNA, 20 bp, Artificial sequence
  Synthetic oligonucleotide
acagaattaattagctaatc

SEQ ID NO: 810 - DNA, 20 bp, Artificial sequence
  Synthetic oligonucleotide
gcttctctccacgccaggca

SEQ ID NO: 811 - DNA, 20 bp, Artificial sequence
  Synthetic oligonucleotide
tagtgtcccccagccaccct

SEQ ID NO: 812 - DNA, 20 bp, Artificial sequence
  Synthetic oligonucleotide
ctgtcagacaccccagggct

SEQ ID NO: 813 - DNA, 20 bp, Artificial sequence
  Synthetic oligonucleotide
tcgggtcattcttcagcgga

SEQ ID NO: 814 - DNA, 20 bp, Artificial sequence
  Synthetic oligonucleotide
agcaagtgccctcccccgac

SEQ ID NO: 815 - DNA, 20 bp, Artificial sequence
  Synthetic oligonucleotide
gagggaccccactgtggaca

SEQ ID NO: 816 - DNA, 20 bp, Artificial sequence
  Synthetic oligonucleotide
aggaagcttattatggccac

SEQ ID NO: 817 - DNA, 20 bp, Artificial sequence
  Synthetic oligonucleotide
agaggatccacccagggact

SEQ ID NO: 818 - DNA, 20 bp, Artificial sequence
  Synthetic oligonucleotide
atccctcttgcaaacacacc

SEQ ID NO: 819 - DNA, 20 bp, Artificial sequence
  Synthetic oligonucleotide
ttgctttcctgatctcaaca

SEQ ID NO: 820 - DNA, 20 bp, Artificial sequence
  Synthetic oligonucleotide
aggtctaggactattatacc

SEQ ID NO: 821 - DNA, 20 bp, Artificial sequence
  Synthetic oligonucleotide
ttgacacacaacacacatta

SEQ ID NO: 822 - DNA, 20 bp, Artificial sequence
  Synthetic oligonucleotide
gggtagcccttcacatacct

SEQ ID NO: 823 - DNA, 20 bp, Artificial sequence
  Synthetic oligonucleotide
gttgttctcccctccgctcc

SEQ ID NO: 824 - DNA, 20 bp, Artificial sequence
  Synthetic oligonucleotide
cccaacccgcttcctaaccc

SEQ ID NO: 825 - DNA, 20 bp, Artificial sequence
  Synthetic oligonucleotide
cggatttgctagctgagccc

SEQ ID NO: 826 - DNA, 20 bp, Artificial sequence
  Synthetic oligonucleotide
ctgactgtccccctctgttt

SEQ ID NO: 827 - DNA, 20 bp, Artificial sequence
  Synthetic oligonucleotide
acgcaggtgcagcccagcca

SEQ ID NO: 828 - DNA, 20 bp, Artificial sequence
  Synthetic oligonucleotide
taggccaggacaacaactca

SEQ ID NO: 829 - DNA, 20 bp, Artificial sequence
  Synthetic oligonucleotide
tttgatgtcactgcctggcc

SEQ ID NO: 830 - DNA, 20 bp, Artificial sequence
  Synthetic oligonucleotide
ccaacagcaacacactggtt

SEQ ID NO: 831 - DNA, 20 bp, Artificial sequence
  Synthetic oligonucleotide
aggtccgaaatcccaagcct

SEQ ID NO: 832 - DNA, 20 bp, Artificial sequence
  Synthetic oligonucleotide
cagcagcacccacttatcac

SEQ ID NO: 833 - DNA, 20 bp, Artificial sequence
  Synthetic oligonucleotide
cctccagaatgcatccattt

SEQ ID NO: 834 - DNA, 20 bp, Artificial sequence
  Synthetic oligonucleotide
ccaagcctccttgctgcggc

SEQ ID NO: 835 - DNA, 20 bp, Artificial sequence
  Synthetic oligonucleotide
tcatgtgtccaccacacgcc

SEQ ID NO: 836 - DNA, 20 bp, Artificial sequence
  Synthetic oligonucleotide
cgatccaccctaaatggtcc

SEQ ID NO: 837 - DNA, 20 bp, Artificial sequence
  Synthetic oligonucleotide
cttcagcattcactgagcct

SEQ ID NO: 838 - DNA, 20 bp, Artificial sequence
  Synthetic oligonucleotide
tctgtatcccctcgcccggc

SEQ ID NO: 839 - DNA, 20 bp, Artificial sequence
  Synthetic oligonucleotide
gggagataaactaaactctt

SEQ ID NO: 840 - DNA, 20 bp, Artificial sequence
  Synthetic oligonucleotide
ccccaggctaacatgctgaa

SEQ ID NO: 841 - DNA, 20 bp, Artificial sequence
  Synthetic oligonucleotide
ccgtcaggacccaagccctc

SEQ ID NO: 842 - DNA, 20 bp, Artificial sequence
  Synthetic oligonucleotide
tccaaggcaacacccagcca

SEQ ID NO: 843 - DNA, 20 bp, Artificial sequence
  Synthetic oligonucleotide
acttaattatatctcccgtg

SEQ ID NO: 844 - DNA, 20 bp, Artificial sequence
  Synthetic oligonucleotide
tagggcaccctctcttacat

SEQ ID NO: 845 - DNA, 20 bp, Artificial sequence
  Synthetic oligonucleotide
cactgcgacctcattccgcc

SEQ ID NO: 846 - DNA, 20 bp, Artificial sequence
  Synthetic oligonucleotide
cggcctgacacctgcccctc

SEQ ID NO: 847 - DNA, 20 bp, Artificial sequence
  Synthetic oligonucleotide
tgctcagaaaatgaccaact

SEQ ID NO: 848 - DNA, 20 bp, Artificial sequence
  Synthetic oligonucleotide
gtgctactcacacaatgtca

SEQ ID NO: 849 - DNA, 20 bp, Artificial sequence
  Synthetic oligonucleotide
tgtgaacttcctccccttcc

SEQ ID NO: 850 - DNA, 20 bp, Artificial sequence
  Synthetic oligonucleotide
caggccttctctccagggaa

SEQ ID NO: 851 - DNA, 20 bp, Artificial sequence
  Synthetic oligonucleotide
tgggaacctccttagtggcc

SEQ ID NO: 852 - DNA, 20 bp, Artificial sequence
  Synthetic oligonucleotide
agcagcagtcccagaagccc

SEQ ID NO: 853 - DNA, 20 bp, Artificial sequence
  Synthetic oligonucleotide
gctatgggccactgcagcct

SEQ ID NO: 854 - DNA, 20 bp, Artificial sequence
  Synthetic oligonucleotide
gtcctgccccagacgcaccg

SEQ ID NO: 855 - DNA, 20 bp, Artificial sequence
  Synthetic oligonucleotide
acacttacacccattccatt

SEQ ID NO: 856 - DNA, 20 bp, Artificial sequence
  Synthetic oligonucleotide
agcttgtccctaagttggcc

SEQ ID NO: 857 - DNA, 20 bp, Artificial sequence
  Synthetic oligonucleotide
gctccggacacccaccagga

SEQ ID NO: 858 - DNA, 20 bp, Artificial sequence
  Synthetic oligonucleotide
ttggagtccccacccctgca

SEQ ID NO: 859 - DNA, 20 bp, Artificial sequence
  Synthetic oligonucleotide
cgcagccacacactcgccac

SEQ ID NO: 860 - DNA, 20 bp, Artificial sequence
  Synthetic oligonucleotide
tactggccaacctatgtgga

SEQ ID NO: 861 - DNA, 20 bp, Artificial sequence
  Synthetic oligonucleotide
ccacggaactccatgggtcc

SEQ ID NO: 862 - DNA, 20 bp, Artificial sequence
  Synthetic oligonucleotide
tgacaaagatttccctagac

SEQ ID NO: 863 - DNA, 20 bp, Artificial sequence
  Synthetic oligonucleotide
cacaccagcccttccgtcca

SEQ ID NO: 864 - DNA, 20 bp, Artificial sequence
  Synthetic oligonucleotide
cgtggcccaccatccgatgc

SEQ ID NO: 865 - DNA, 20 bp, Artificial sequence
  Synthetic oligonucleotide
gtgtatgccatctccacctc

SEQ ID NO: 866 - DNA, 20 bp, Artificial sequence
  Synthetic oligonucleotide
tctgcacccattcctgctcc

SEQ ID NO: 867 - DNA, 20 bp, Artificial sequence
  Synthetic oligonucleotide
ggcactgtgtcaacttgata

SEQ ID NO: 868 - DNA, 20 bp, Artificial sequence
  Synthetic oligonucleotide
ctgggcagaacctgctatcc

SEQ ID NO: 869 - DNA, 20 bp, Artificial sequence
  Synthetic oligonucleotide
gacccctgcacactcactca

SEQ ID NO: 870 - DNA, 20 bp, Artificial sequence
  Synthetic oligonucleotide
caccccacatgatctacact

SEQ ID NO: 871 - DNA, 20 bp, Artificial sequence
  Synthetic oligonucleotide
cccctcctgtcctatagaca

SEQ ID NO: 872 - DNA, 20 bp, Artificial sequence
  Synthetic oligonucleotide
gcagcacccacttatcactt

SEQ ID NO: 873 - DNA, 20 bp, Artificial sequence
  Synthetic oligonucleotide
gctactcacacaatgtcact

SEQ ID NO: 874 - DNA, 20 bp, Artificial sequence
  Synthetic oligonucleotide
gcccgtctcacctctgccag

SEQ ID NO: 875 - DNA, 20 bp, Artificial sequence
  Synthetic oligonucleotide
gagaagctgctaactccaga

SEQ ID NO: 876 - DNA, 20 bp, Artificial sequence
  Synthetic oligonucleotide
tcgcccggccctgcttgcct

SEQ ID NO: 877 - DNA, 20 bp, Artificial sequence
  Synthetic oligonucleotide
tagcccttcacatacctggg

SEQ ID NO: 878 - DNA, 20 bp, Artificial sequence
  Synthetic oligonucleotide
gggccaggtccactcccatc

SEQ ID NO: 879 - DNA, 20 bp, Artificial sequence
  Synthetic oligonucleotide
cgcgcgcccctacctctggc

SEQ ID NO: 880 - DNA, 20 bp, Artificial sequence
  Synthetic oligonucleotide
gtctaggactattataccca

SEQ ID NO: 881 - DNA, 20 bp, Artificial sequence
  Synthetic oligonucleotide
gctgggaactcacaattctc

SEQ ID NO: 882 - DNA, 20 bp, Artificial sequence
  Synthetic oligonucleotide
gcacggcaaccctccagggc

SEQ ID NO: 883 - DNA, 20 bp, Artificial sequence
  Synthetic oligonucleotide
aaaggagcctaccttgcctt

SEQ ID NO: 884 - DNA, 20 bp, Artificial sequence
  Synthetic oligonucleotide
ttgcggtacatctgtgtaaa

SEQ ID NO: 885 - DNA, 20 bp, Artificial sequence
  Synthetic oligonucleotide
cctgccccagacgcaccgtc

SEQ ID NO: 886 - DNA, 20 bp, Artificial sequence
  Synthetic oligonucleotide
cccctgcacactcactcata

SEQ ID NO: 887 - DNA, 20 bp, Artificial sequence
  Synthetic oligonucleotide
gggctgtcggtcacttgtca

SEQ ID NO: 888 - DNA, 20 bp, Artificial sequence
  Synthetic oligonucleotide
tcagaaaatgaccaactcac

SEQ ID NO: 889 - DNA, 20 bp, Artificial sequence
  Synthetic oligonucleotide
gtgaacttcctccccttccg

SEQ ID NO: 890 - DNA, 20 bp, Artificial sequence
  Synthetic oligonucleotide
tgccccagaacctccgaggt

SEQ ID NO: 891 - DNA, 20 bp, Artificial sequence
  Synthetic oligonucleotide
cctcttgcaaacacaccctt

SEQ ID NO: 892 - DNA, 20 bp, Artificial sequence
  Synthetic oligonucleotide
cgtacttgcactcctcctca

SEQ ID NO: 893 - DNA, 20 bp, Artificial sequence
  Synthetic oligonucleotide
cggacacccaccaggagagc

SEQ ID NO: 894 - DNA, 20 bp, Artificial sequence
  Synthetic oligonucleotide
actggcttcttctagaacac

SEQ ID NO: 895 - DNA, 20 bp, Artificial sequence
  Synthetic oligonucleotide
ccatcattacccaccatgct

SEQ ID NO: 896 - DNA, 20 bp, Artificial sequence
  Synthetic oligonucleotide
ccaggaccccatcccagtgt

SEQ ID NO: 897 - DNA, 20 bp, Artificial sequence
  Synthetic oligonucleotide
acagtgacaaccccgaccct

SEQ ID NO: 898 - DNA, 20 bp, Artificial sequence
  Synthetic oligonucleotide
gatccaccctaaatggtcca

SEQ ID NO: 899 - DNA, 20 bp, Artificial sequence
  Synthetic oligonucleotide
tacacccattccatttcagc

SEQ ID NO: 900 - DNA, 20 bp, Artificial sequence
  Synthetic oligonucleotide
caacagcaacacactggttc

SEQ ID NO: 901 - DNA, 20 bp, Artificial sequence
  Synthetic oligonucleotide
gggaacctccttagtggccc

SEQ ID NO: 902 - DNA, 20 bp, Artificial sequence
  Synthetic oligonucleotide
actgcgacctcattccgcca

SEQ ID NO: 903 - DNA, 20 bp, Artificial sequence
  Synthetic oligonucleotide
aacctgctatccctatgggc

SEQ ID NO: 904 - DNA, 20 bp, Artificial sequence
  Synthetic oligonucleotide
agacgaggcctttaaagcgg

SEQ ID NO: 905 - DNA, 20 bp, Artificial sequence
  Synthetic oligonucleotide
tccgctagctcctcagagtc

SEQ ID NO: 906 - DNA, 20 bp, Artificial sequence
  Synthetic oligonucleotide
tgacacacaacacacattac

SEQ ID NO: 907 - DNA, 20 bp, Artificial sequence
  Synthetic oligonucleotide
catgggtccacacctgatgc

SEQ ID NO: 908 - DNA, 20 bp, Artificial sequence
  Synthetic oligonucleotide
gtggcccaccatccgatgcc

SEQ ID NO: 909 - DNA, 20 bp, Artificial sequence
  Synthetic oligonucleotide
ggctggtgaccccaacatct

SEQ ID NO: 910 - DNA, 20 bp, Artificial sequence
  Synthetic oligonucleotide
cctgggttccctacttactg

SEQ ID NO: 911 - DNA, 20 bp, Artificial sequence
  Synthetic oligonucleotide
cacggcttctatctcacacc

SEQ ID NO: 912 - DNA, 20 bp, Artificial sequence
  Synthetic oligonucleotide
gtatgccatctccacctcct

SEQ ID NO: 913 - DNA, 20 bp, Artificial sequence
  Synthetic oligonucleotide
agcctgttcatctcagcagc

SEQ ID NO: 914 - DNA, 20 bp, Artificial sequence
  Synthetic oligonucleotide
gccttgaccctcactcccat

SEQ ID NO: 915 - DNA, 20 bp, Artificial sequence
  Synthetic oligonucleotide
ccaacccgcttcctaaccct

SEQ ID NO: 916 - DNA, 20 bp, Artificial sequence
  Synthetic oligonucleotide
caaggcaacacccagccagc

SEQ ID NO: 917 - DNA, 20 bp, Artificial sequence
  Synthetic oligonucleotide
gcagggttcaccccgatggc

SEQ ID NO: 918 - DNA, 20 bp, Artificial sequence
  Synthetic oligonucleotide
aattagctaatcatcaggtt

SEQ ID NO: 919 - DNA, 20 bp, Artificial sequence
  Synthetic oligonucleotide
accatcttccgcccaatgcc

SEQ ID NO: 920 - DNA, 20 bp, Artificial sequence
  Synthetic oligonucleotide
ggagataaactaaactcttc

SEQ ID NO: 921 - DNA, 20 bp, Artificial sequence
  Synthetic oligonucleotide
gccaggacaacaactcagga

SEQ ID NO: 922 - DNA, 20 bp, Artificial sequence
  Synthetic oligonucleotide
gtgaaatcccatgccagctt

SEQ ID NO: 923 - DNA, 20 bp, Artificial sequence
  Synthetic oligonucleotide
gcttgtccctaagttggcca

SEQ ID NO: 924 - DNA, 20 bp, Artificial sequence
  Synthetic oligonucleotide
agtctgtgtcctccaagggc

SEQ ID NO: 925 - DNA, 20 bp, Artificial sequence
  Synthetic oligonucleotide
gcaagtgccctcccccgaca

SEQ ID NO: 926 - DNA, 20 bp, Artificial sequence
  Synthetic oligonucleotide
cccacatgatctacactgga

SEQ ID NO: 927 - DNA, 20 bp, Artificial sequence
  Synthetic oligonucleotide
actggccaacctatgtggaa

SEQ ID NO: 928 - DNA, 20 bp, Artificial sequence
  Synthetic oligonucleotide
gccgaggtccctccagtggc

SEQ ID NO: 929 - DNA, 20 bp, Artificial sequence
  Synthetic oligonucleotide
ctgctccaataaaccagacc

SEQ ID NO: 930 - DNA, 20 bp, Artificial sequence
  Synthetic oligonucleotide
ttgtggtccacttctcagct

SEQ ID NO: 931 - DNA, 20 bp, Artificial sequence
  Synthetic oligonucleotide
cacggaggccacacttcccc

SEQ ID NO: 932 - DNA, 20 bp, Artificial sequence
  Synthetic oligonucleotide
agaggctcgaccctatggct

SEQ ID NO: 933 - DNA, 20 bp, Artificial sequence
  Synthetic oligonucleotide
gctgaaatcttctacaggaa

SEQ ID NO: 934 - DNA, 20 bp, Artificial sequence
  Synthetic oligonucleotide
atgtgtccaccacacgcccc

SEQ ID NO: 935 - DNA, 20 bp, Artificial sequence
  Synthetic oligonucleotide
atacctgtctccccattcct

SEQ ID NO: 936 - DNA, 20 bp, Artificial sequence
  Synthetic oligonucleotide
ccaggcttcaccgagctcct

SEQ ID NO: 937 - DNA, 20 bp, Artificial sequence
  Synthetic oligonucleotide
gctcttttcccaaaacccat

SEQ ID NO: 938 - DNA, 20 bp, Artificial sequence
  Synthetic oligonucleotide
agctctgtgcaaacaaggtc

SEQ ID NO: 939 - DNA, 20 bp, Artificial sequence
  Synthetic oligonucleotide
gaacacccagccgttagcct

SEQ ID NO: 940 - DNA, 20 bp, Artificial sequence
  Synthetic oligonucleotide
ccgatgttctccctccaaac

SEQ ID NO: 941 - DNA, 20 bp, Artificial sequence
  Synthetic oligonucleotide
ccagaatgcatccatttaat

SEQ ID NO: 942 - DNA, 20 bp, Artificial sequence
  Synthetic oligonucleotide
gaagtggtcatccctgcacc

SEQ ID NO: 943 - DNA, 20 bp, Artificial sequence
  Synthetic oligonucleotide
gacaaagatttccctagact

SEQ ID NO: 944 - DNA, 20 bp, Artificial sequence
  Synthetic oligonucleotide
cggtgaccaccaccctcccc

SEQ ID NO: 945 - DNA, 20 bp, Artificial sequence
  Synthetic oligonucleotide
ttgttctcccctccgctccg

SEQ ID NO: 946 - DNA, 20 bp, Artificial sequence
  Synthetic oligonucleotide
ggcaccctctcttacatcca

SEQ ID NO: 947 - DNA, 20 bp, Artificial sequence
  Synthetic oligonucleotide
tgactgtccccctctgtttc

SEQ ID NO: 948 - DNA, 20 bp, Artificial sequence
  Synthetic oligonucleotide
agcccaagcacacttcccac

SEQ ID NO: 949 - DNA, 20 bp, Artificial sequence
  Synthetic oligonucleotide
acacccattccatttcagct

SEQ ID NO: 950 - DNA, 20 bp, Artificial sequence
  Synthetic oligonucleotide
ctgggttccctacttactga

SEQ ID NO: 951 - DNA, 20 bp, Artificial sequence
  Synthetic oligonucleotide
gggcagtcgccactctgcct

SEQ ID NO: 952 - DNA, 20 bp, Artificial sequence
  Synthetic oligonucleotide
atcattacccaccatgctga

SEQ ID NO: 953 - DNA, 20 bp, Artificial sequence
  Synthetic oligonucleotide
gaggctcgaccctatggcta

SEQ ID NO: 954 - DNA, 20 bp, Artificial sequence
  Synthetic oligonucleotide
ctcggtgattttcatctgca

SEQ ID NO: 955 - DNA, 20 bp, Artificial sequence
  Synthetic oligonucleotide
gagttctgaccaactgacca

SEQ ID NO: 956 - DNA, 20 bp, Artificial sequence
  Synthetic oligonucleotide
caccctctcttacatccagt

SEQ ID NO: 957 - DNA, 20 bp, Artificial sequence
  Synthetic oligonucleotide
gagcacacccctctgccggc

SEQ ID NO: 958 - DNA, 20 bp, Artificial sequence
  Synthetic oligonucleotide
tacctgtctccccattcctc

SEQ ID NO: 959 - DNA, 20 bp, Artificial sequence
  Synthetic oligonucleotide
tcgagggcacccactccacc

SEQ ID NO: 960 - DNA, 20 bp, Artificial sequence
  Synthetic oligonucleotide
acggcttctatctcacaccc

SEQ ID NO: 961 - DNA, 20 bp, Artificial sequence
  Synthetic oligonucleotide
gctggtgaccccaacatctc

SEQ ID NO: 962 - DNA, 20 bp, Artificial sequence
  Synthetic oligonucleotide
tgcgacctcattccgccaac

SEQ ID NO: 963 - DNA, 20 bp, Artificial sequence
  Synthetic oligonucleotide
atcgctccagtccttgcttc

SEQ ID NO: 964 - DNA, 20 bp, Artificial sequence
  Synthetic oligonucleotide
cctgcttgcctctcgggccc

SEQ ID NO: 965 - DNA, 20 bp, Artificial sequence
  Synthetic oligonucleotide
tcacttgtcaccatggccat

SEQ ID NO: 966 - DNA, 20 bp, Artificial sequence
  Synthetic oligonucleotide
atgggtccacacctgatgct

SEQ ID NO: 967 - DNA, 20 bp, Artificial sequence
  Synthetic oligonucleotide
cccgtctcacctctgccagt

SEQ ID NO: 968 - DNA, 20 bp, Artificial sequence
  Synthetic oligonucleotide
cctccctttttccttccgga

SEQ ID NO: 969 - DNA, 20 bp, Artificial sequence
  Synthetic oligonucleotide
tctaggactattatacccag

SEQ ID NO: 970 - DNA, 20 bp, Artificial sequence
  Synthetic oligonucleotide
gcacccacttatcacttctc

SEQ ID NO: 971 - DNA, 20 bp, Artificial sequence
  Synthetic oligonucleotide
cagccgttagcctctcggcc

SEQ ID NO: 972 - DNA, 20 bp, Artificial sequence
  Synthetic oligonucleotide
agctgctaactccagaagga

SEQ ID NO: 973 - DNA, 20 bp, Artificial sequence
  Synthetic oligonucleotide
gatggtgacaaccacaccac

SEQ ID NO: 974 - DNA, 20 bp, Artificial sequence
  Synthetic oligonucleotide
gtacttgcactcctcctcac

SEQ ID NO: 975 - DNA, 20 bp, Artificial sequence
  Synthetic oligonucleotide
ccgtaccctacacgctggaa

SEQ ID NO: 976 - DNA, 20 bp, Artificial sequence
  Synthetic oligonucleotide
ccgaggtccctccagtggca

SEQ ID NO: 977 - DNA, 20 bp, Artificial sequence
  Synthetic oligonucleotide
gctcaaaccaccgccaggac

SEQ ID NO: 978 - DNA, 20 bp, Artificial sequence
  Synthetic oligonucleotide
gacgaggcctttaaagcggt

SEQ ID NO: 979 - DNA, 20 bp, Artificial sequence
  Synthetic oligonucleotide
agtggtcatccctgcaccca

SEQ ID NO: 980 - DNA, 20 bp, Artificial sequence
  Synthetic oligonucleotide
ctccaaacaattatgcgatt

SEQ ID NO: 981 - DNA, 20 bp, Artificial sequence
  Synthetic oligonucleotide
tggagacctctcctctgctt

SEQ ID NO: 982 - DNA, 20 bp, Artificial sequence
  Synthetic oligonucleotide
gagctgccttgaacaaggct

SEQ ID NO: 983 - DNA, 20 bp, Artificial sequence
  Synthetic oligonucleotide
ctggatggtccaccctgaac

SEQ ID NO: 984 - DNA, 20 bp, Artificial sequence
  Synthetic oligonucleotide
cttttcccaaaacccatggt

SEQ ID NO: 985 - DNA, 20 bp, Artificial sequence
  Synthetic oligonucleotide
ctaaatggtccaccccggac

SEQ ID NO: 986 - DNA, 20 bp, Artificial sequence
  Synthetic oligonucleotide
acggaggccacacttccccc

SEQ ID NO: 987 - DNA, 20 bp, Artificial sequence
  Synthetic oligonucleotide
agaaaatgaccaactcactg

SEQ ID NO: 988 - DNA, 20 bp, Artificial sequence
  Synthetic oligonucleotide
ggccaggtccactcccatcc

SEQ ID NO: 989 - DNA, 20 bp, Artificial sequence
  Synthetic oligonucleotide
gaaatcttctacaggaagcc

SEQ ID NO: 990 - DNA, 20 bp, Artificial sequence
  Synthetic oligonucleotide
ccggctgttcccctccacct

SEQ ID NO: 991 - DNA, 20 bp, Artificial sequence
  Synthetic oligonucleotide
tgtggtccacttctcagctt

SEQ ID NO: 992 - DNA, 20 bp, Artificial sequence
  Synthetic oligonucleotide
ctggatttgtccatactccc

SEQ ID NO: 993 - DNA, 20 bp, Artificial sequence
  Synthetic oligonucleotide
taggttaaaaaactctcctc

SEQ ID NO: 994 - DNA, 20 bp, Artificial sequence
  Synthetic oligonucleotide
acaaagatttccctagactt

SEQ ID NO: 995 - DNA, 20 bp, Artificial sequence
  Synthetic oligonucleotide
gtcggctgcacaaaccctgc

SEQ ID NO: 996 - DNA, 20 bp, Artificial sequence
  Synthetic oligonucleotide
gcatgccgtcctccacatcc

SEQ ID NO: 997 - DNA, 20 bp, Artificial sequence
  Synthetic oligonucleotide
ctgggtggcaccttcagaaa

SEQ ID NO: 998 - DNA, 20 bp, Artificial sequence
  Synthetic oligonucleotide
tcttccgcccaatgccccct

SEQ ID NO: 999 - DNA, 20 bp, Artificial sequence
  Synthetic oligonucleotide
gctccaataaaccagacctt

SEQ ID NO: 1000 - DNA, 20 bp, Artificial sequence
  Synthetic oligonucleotide
aactgagtgcccaaaactac

SEQ ID NO: 1001 - DNA, 20 bp, Artificial sequence
  Synthetic oligonucleotide
tgggaactcacaattctcaa

SEQ ID NO: 1002 - DNA, 20 bp, Artificial sequence
  Synthetic oligonucleotide
gagataaactaaactcttca

SEQ ID NO: 1003 - DNA, 20 bp, Artificial sequence
  Synthetic oligonucleotide
caggaccccatcccagtgtc

SEQ ID NO: 1004 - DNA, 20 bp, Artificial sequence
  Synthetic oligonucleotide
cgcttcctaaccctgcaggc

SEQ ID NO: 1005 - DNA, 20 bp, Artificial sequence
  Synthetic oligonucleotide
cagaatgcatccatttaata

SEQ ID NO: 1006 - DNA, 20 bp, Artificial sequence
  Synthetic oligonucleotide
gagctgagtctttccggcct

SEQ ID NO: 1007 - DNA, 20 bp, Artificial sequence
  Synthetic oligonucleotide
aagcacacttcccaccacaa

SEQ ID NO: 1008 - DNA, 20 bp, Artificial sequence
  Synthetic oligonucleotide
gacacccaccaggagagcca

SEQ ID NO: 1009 - DNA, 20 bp, Artificial sequence
  Synthetic oligonucleotide
ggcccaccatccgatgccca

SEQ ID NO: 1010 - DNA, 20 bp, Artificial sequence
  Synthetic oligonucleotide
atcccatgccagcttctcct

SEQ ID NO: 1011 - DNA, 20 bp, Artificial sequence
  Synthetic oligonucleotide
gtccgtagcagaacttggct

SEQ ID NO: 1012 - DNA, 20 bp, Artificial sequence
  Synthetic oligonucleotide
agagactcgctcatcagcga

SEQ ID NO: 1013 - DNA, 20 bp, Artificial sequence
  Synthetic oligonucleotide
aaggagcctaccttgccttt

SEQ ID NO: 1014 - DNA, 20 bp, Artificial sequence
  Synthetic oligonucleotide
cccagctccatcctgattca

SEQ ID NO: 1015 - DNA, 20 bp, Artificial sequence
  Synthetic oligonucleotide
ccccctctgtttcaaagctc

SEQ ID NO: 1016 - DNA, 20 bp, Artificial sequence
  Synthetic oligonucleotide
aggcaacacccagccagctc

SEQ ID NO: 1017 - DNA, 20 bp, Artificial sequence
  Synthetic oligonucleotide
acctgctatccctatgggcc

SEQ ID NO: 1018 - DNA, 20 bp, Artificial sequence
  Synthetic oligonucleotide
ttgaccctcactcccatgtc

SEQ ID NO: 1019 - DNA, 20 bp, Artificial sequence
  Synthetic oligonucleotide
ggtgacttcccaactggctc

SEQ ID NO: 1020 - DNA, 20 bp, Artificial sequence
  Synthetic oligonucleotide
gacacaccccccttgcacac

SEQ ID NO: 1021 - DNA, 20 bp, Artificial sequence
  Synthetic oligonucleotide
tgtgtccaccacacgccccc

SEQ ID NO: 1022 - DNA, 20 bp, Artificial sequence
  Synthetic oligonucleotide
atgctgctccatgggagcac

SEQ ID NO: 1023 - DNA, 20 bp, Artificial sequence
  Synthetic oligonucleotide
acggcaaccctccagggccg

SEQ ID NO: 1024 - DNA, 20 bp, Artificial sequence
  Synthetic oligonucleotide
ggagaccacagaactccaga

SEQ ID NO: 1025 - DNA, 20 bp, Artificial sequence
  Synthetic oligonucleotide
ctactgaccccagcttgcca

SEQ ID NO: 1026 - DNA, 20 bp, Artificial sequence
  Synthetic oligonucleotide
gcctgacagcccctgtgcca

SEQ ID NO: 1027 - DNA, 20 bp, Artificial sequence
  Synthetic oligonucleotide
gtggcaccttcagaaaggcc

SEQ ID NO: 1028 - DNA, 20 bp, Artificial sequence
  Synthetic oligonucleotide
ctttccggccttcctgacca

SEQ ID NO: 1029 - DNA, 20 bp, Artificial sequence
  Synthetic oligonucleotide
gagctcgcaaaaggctgccc

SEQ ID NO: 1030 - DNA, 20 bp, Artificial sequence
  Synthetic oligonucleotide
aactgcccttttagagagca

SEQ ID NO: 1031 - DNA, 20 bp, Artificial sequence
  Synthetic oligonucleotide
ggagacctctcctctgcttc

SEQ ID NO: 1032 - DNA, 20 bp, Artificial sequence
  Synthetic oligonucleotide
tggtgttgctcaactccaga

SEQ ID NO: 1033 - DNA, 20 bp, Artificial sequence
  Synthetic oligonucleotide
ggccacacttccccccggaa

SEQ ID NO: 1034 - DNA, 20 bp, Artificial sequence
  Synthetic oligonucleotide
acccgagacaccatctggta

SEQ ID NO: 1035 - DNA, 20 bp, Artificial sequence
  Synthetic oligonucleotide
cgcacaggcacaaaatgccc

SEQ ID NO: 1036 - DNA, 20 bp, Artificial sequence
  Synthetic oligonucleotide
catgccgtcctccacatcca

SEQ ID NO: 1037 - DNA, 20 bp, Artificial sequence
  Synthetic oligonucleotide
gggcatcaaccagaatgcgg

SEQ ID NO: 1038 - DNA, 20 bp, Artificial sequence
  Synthetic oligonucleotide
ggatggtccaccctgaacag

SEQ ID NO: 1039 - DNA, 20 bp, Artificial sequence
  Synthetic oligonucleotide
gaccttgactcaatcatgca

SEQ ID NO: 1040 - DNA, 20 bp, Artificial sequence
  Synthetic oligonucleotide
ggcatggttctctctaggcg

SEQ ID NO: 1041 - DNA, 20 bp, Artificial sequence
  Synthetic oligonucleotide
cgagcatccccctacgcctc

SEQ ID NO: 1042 - DNA, 20 bp, Artificial sequence
  Synthetic oligonucleotide
ccaactgaccatgccaggac

SEQ ID NO: 1043 - DNA, 20 bp, Artificial sequence
  Synthetic oligonucleotide
cacacttcccaccacaaggc

SEQ ID NO: 1044 - DNA, 20 bp, Artificial sequence
  Synthetic oligonucleotide
cggctgttcccctccacctg

SEQ ID NO: 1045 - DNA, 20 bp, Artificial sequence
  Synthetic oligonucleotide
accacagaactccagaagca

SEQ ID NO: 1046 - DNA, 20 bp, Artificial sequence
  Synthetic oligonucleotide
cccccaaccctccatcggtc

SEQ ID NO: 1047 - DNA, 20 bp, Artificial sequence
  Synthetic oligonucleotide
actgagtgcccaaaactaca

SEQ ID NO: 1048 - DNA, 20 bp, Artificial sequence
  Synthetic oligonucleotide
gaatgcatccatttaataga

SEQ ID NO: 1049 - DNA, 20 bp, Artificial sequence
  Synthetic oligonucleotide
gccccagacgcaccgtcaca

SEQ ID NO: 1050 - DNA, 20 bp, Artificial sequence
  Synthetic oligonucleotide
agggagacacaccctcccca

SEQ ID NO: 1051 - DNA, 20 bp, Artificial sequence
  Synthetic oligonucleotide
ccctttttccttccggagtc

SEQ ID NO: 1052 - DNA, 20 bp, Artificial sequence
  Synthetic oligonucleotide
accacacgcccccccacgca

SEQ ID NO: 1053 - DNA, 20 bp, Artificial sequence
  Synthetic oligonucleotide
cggcttctatctcacacccg

SEQ ID NO: 1054 - DNA, 20 bp, Artificial sequence
  Synthetic oligonucleotide
gactcgctcatcagcgagaa

SEQ ID NO: 1055 - DNA, 20 bp, Artificial sequence
  Synthetic oligonucleotide
aggaccccatcccagtgtcc

SEQ ID NO: 1056 - DNA, 20 bp, Artificial sequence
  Synthetic oligonucleotide
ttgcctgtcctcaccagggt

SEQ ID NO: 1057 - DNA, 20 bp, Artificial sequence
  Synthetic oligonucleotide
ctggtgaccccaacatctcc

SEQ ID NO: 1058 - DNA, 20 bp, Artificial sequence
  Synthetic oligonucleotide
tggatttgtccatactccca

SEQ ID NO: 1059 - DNA, 20 bp, Artificial sequence
  Synthetic oligonucleotide
cacccacttatcacttctca

SEQ ID NO: 1060 - DNA, 20 bp, Artificial sequence
  Synthetic oligonucleotide
gaactcacaattctcaaact

SEQ ID NO: 1061 - DNA, 20 bp, Artificial sequence
  Synthetic oligonucleotide
cctgtctgtcttcagcattc

SEQ ID NO: 1062 - DNA, 20 bp, Artificial sequence
  Synthetic oligonucleotide
ccccatgccctactcggtct

SEQ ID NO: 1063 - DNA, 20 bp, Artificial sequence
  Synthetic oligonucleotide
catgtgtgcatacaccggca

SEQ ID NO: 1064 - DNA, 20 bp, Artificial sequence
  Synthetic oligonucleotide
cacccattccatttcagctg

SEQ ID NO: 1065 - DNA, 20 bp, Artificial sequence
  Synthetic oligonucleotide
tgaccctcactcccatgtca

SEQ ID NO: 1066 - DNA, 20 bp, Artificial sequence
  Synthetic oligonucleotide
attccgccaactcctggccc

SEQ ID NO: 1067 - DNA, 20 bp, Artificial sequence
  Synthetic oligonucleotide
cctctcttacatccagtcga

SEQ ID NO: 1068 - DNA, 20 bp, Artificial sequence
  Synthetic oligonucleotide
cgtgagtcctcagagcactt

SEQ ID NO: 1069 - DNA, 20 bp, Artificial sequence
  Synthetic oligonucleotide
tacttgcactcctcctcaca

SEQ ID NO: 1070 - DNA, 20 bp, Artificial sequence
  Synthetic oligonucleotide
ccccattcctcctttgtata

SEQ ID NO: 1071 - DNA, 20 bp, Artificial sequence
  Synthetic oligonucleotide
gataaactaaactcttcacc

SEQ ID NO: 1072 - DNA, 20 bp, Artificial sequence
  Synthetic oligonucleotide
cttccgcccaatgcccccta

SEQ ID NO: 1073 - DNA, 20 bp, Artificial sequence
  Synthetic oligonucleotide
cctgcacccacctcgcaggc

SEQ ID NO: 1074 - DNA, 20 bp, Artificial sequence
  Synthetic oligonucleotide
cggctgcacaaaccctgcca

SEQ ID NO: 1075 - DNA, 20 bp, Artificial sequence
  Synthetic oligonucleotide
tcggtgattttcatctgcag

SEQ ID NO: 1076 - DNA, 20 bp, Artificial sequence
  Synthetic oligonucleotide
ccgtagtgaccctaaaagtc

SEQ ID NO: 1077 - DNA, 20 bp, Artificial sequence
  Synthetic oligonucleotide
gtgacttcccaactggctct

SEQ ID NO: 1078 - DNA, 20 bp, Artificial sequence
  Synthetic oligonucleotide
gcctcgctttaccctcccaa

SEQ ID NO: 1079 - DNA, 20 bp, Artificial sequence
  Synthetic oligonucleotide
taggactattatacccagcc

SEQ ID NO: 1080 - DNA, 20 bp, Artificial sequence
  Synthetic oligonucleotide
ggtgacaaccacaccacaca

SEQ ID NO: 1081 - DNA, 20 bp, Artificial sequence
  Synthetic oligonucleotide
cctgctatccctatgggccc

SEQ ID NO: 1082 - DNA, 20 bp, Artificial sequence
  Synthetic oligonucleotide
atgctgagcaccaccggacc

SEQ ID NO: 1083 - DNA, 20 bp, Artificial sequence
  Synthetic oligonucleotide
acgaggcctttaaagcggtc

SEQ ID NO: 1084 - DNA, 20 bp, Artificial sequence
  Synthetic oligonucleotide
tccagggaacccctttcctt

SEQ ID NO: 1085 - DNA, 20 bp, Artificial sequence
  Synthetic oligonucleotide
gcctggcggccaacagcacc

SEQ ID NO: 1086 - DNA, 20 bp, Artificial sequence
  Synthetic oligonucleotide
aggtccactcccatccttca

SEQ ID NO: 1087 - DNA, 20 bp, Artificial sequence
  Synthetic oligonucleotide
ccctctgtttcaaagctcca

SEQ ID NO: 1088 - DNA, 20 bp, Artificial sequence
  Synthetic oligonucleotide
accatggccatacccatcga

SEQ ID NO: 1089 - DNA, 20 bp, Artificial sequence
  Synthetic oligonucleotide
gaaggttccccaagagagga

SEQ ID NO: 1090 - DNA, 20 bp, Artificial sequence
  Synthetic oligonucleotide
gccgttagcctctcggccca

SEQ ID NO: 1091 - DNA, 20 bp, Artificial sequence
  Synthetic oligonucleotide
gcttcctaaccctgcaggcc

SEQ ID NO: 1092 - DNA, 20 bp, Artificial sequence
  Synthetic oligonucleotide
gctacgcttccttggaggcc

SEQ ID NO: 1093 - DNA, 20 bp, Artificial sequence
  Synthetic oligonucleotide
cgctcccgatacctgcccta

SEQ ID NO: 1094 - DNA, 20 bp, Artificial sequence
  Synthetic oligonucleotide
gtccttgcttcccctgctca

SEQ ID NO: 1095 - DNA, 20 bp, Artificial sequence
  Synthetic oligonucleotide
aacagccggatcctcaggcc

SEQ ID NO: 1096 - DNA, 20 bp, Artificial sequence
  Synthetic oligonucleotide
agaggaagctcctatcccca

SEQ ID NO: 1097 - DNA, 20 bp, Artificial sequence
  Synthetic oligonucleotide
aggttaaaaaactctcctca

SEQ ID NO: 1098 - DNA, 20 bp, Artificial sequence
  Synthetic oligonucleotide
ccggacgatccaccctggac

SEQ ID NO: 1099 - DNA, 20 bp, Artificial sequence
  Synthetic oligonucleotide
ggtgctcacactgacggccg

SEQ ID NO: 1100 - DNA, 20 bp, Artificial sequence
  Synthetic oligonucleotide
ccggtgagactcatgggcat

SEQ ID NO: 1101 - DNA, 20 bp, Artificial sequence
  Synthetic oligonucleotide
gagggcacccactccaccca

SEQ ID NO: 1102 - DNA, 20 bp, Artificial sequence
  Synthetic oligonucleotide
cggacgatccaccctggaca

SEQ ID NO: 1103 - DNA, 20 bp, Artificial sequence
  Synthetic oligonucleotide
cttcagcattcactaaagtc

SEQ ID NO: 1104 - DNA, 20 bp, Artificial sequence
  Synthetic oligonucleotide
ccccagacgcaccgtcacac

SEQ ID NO: 1105 - DNA, 20 bp, Artificial sequence
  Synthetic oligonucleotide
tagcccagcacaccccatct

SEQ ID NO: 1106 - DNA, 20 bp, Artificial sequence
  Synthetic oligonucleotide
gccacacttccccccggaac

SEQ ID NO: 1107 - DNA, 20 bp, Artificial sequence
  Synthetic oligonucleotide
tggccatacccatcgatgca

SEQ ID NO: 1108 - DNA, 20 bp, Artificial sequence
  Synthetic oligonucleotide
tgccacagcctcagtggcac

SEQ ID NO: 1109 - DNA, 20 bp, Artificial sequence
  Synthetic oligonucleotide
cctaagctgcttctgaggac

SEQ ID NO: 1110 - DNA, 20 bp, Artificial sequence
  Synthetic oligonucleotide
tcagacagtcccttgtgtac

SEQ ID NO: 1111 - DNA, 20 bp, Artificial sequence
  Synthetic oligonucleotide
gttgagctgccaaccggtcc

SEQ ID NO: 1112 - DNA, 20 bp, Artificial sequence
  Synthetic oligonucleotide
ccgtccagccccactctacc

SEQ ID NO: 1113 - DNA, 20 bp, Artificial sequence
  Synthetic oligonucleotide
caggctggcatctctaaggc

SEQ ID NO: 1114 - DNA, 20 bp, Artificial sequence
  Synthetic oligonucleotide
ggacagggaccaactcccgg

SEQ ID NO: 1115 - DNA, 20 bp, Artificial sequence
  Synthetic oligonucleotide
tcatctccttctccagcgac

SEQ ID NO: 1116 - DNA, 20 bp, Artificial sequence
  Synthetic oligonucleotide
cctgcagcccatgacactac

SEQ ID NO: 1117 - DNA, 20 bp, Artificial sequence
  Synthetic oligonucleotide
gcattgggaattacaacctg

SEQ ID NO: 1118 - DNA, 20 bp, Artificial sequence
  Synthetic oligonucleotide
gtctgtggacctcaaccccc

SEQ ID NO: 1119 - DNA, 20 bp, Artificial sequence
  Synthetic oligonucleotide
agccagggcccatccctgac

SEQ ID NO: 1120 - DNA, 20 bp, Artificial sequence
  Synthetic oligonucleotide
cgaggcctttaaagcggtca

SEQ ID NO: 1121 - DNA, 20 bp, Artificial sequence
  Synthetic oligonucleotide
tactcggtctttctcctccc

SEQ ID NO: 1122 - DNA, 20 bp, Artificial sequence
  Synthetic oligonucleotide
gagggcagctctagtaggtt

SEQ ID NO: 1123 - DNA, 20 bp, Artificial sequence
  Synthetic oligonucleotide
ggtccaccctgaacagtcca

SEQ ID NO: 1124 - DNA, 20 bp, Artificial sequence
  Synthetic oligonucleotide
actggttcccagacacccct

SEQ ID NO: 1125 - DNA, 20 bp, Artificial sequence
  Synthetic oligonucleotide
tgtgcatacaccggcaggcc

SEQ ID NO: 1126 - DNA, 20 bp, Artificial sequence
  Synthetic oligonucleotide
ggtccactcccatccttcac

SEQ ID NO: 1127 - DNA, 20 bp, Artificial sequence
  Synthetic oligonucleotide
gtggagaccccacctaggtg

SEQ ID NO: 1128 - DNA, 20 bp, Artificial sequence
  Synthetic oligonucleotide
cgtagtgaccctaaaagtcc

SEQ ID NO: 1129 - DNA, 20 bp, Artificial sequence
  Synthetic oligonucleotide
acacttcccaccacaaggcg

SEQ ID NO: 1130 - DNA, 20 bp, Artificial sequence
  Synthetic oligonucleotide
atgccgtcctccacatccac

SEQ ID NO: 1131 - DNA, 20 bp, Artificial sequence
  Synthetic oligonucleotide
cgctgcttccaccaagatta

SEQ ID NO: 1132 - DNA, 20 bp, Artificial sequence
  Synthetic oligonucleotide
cctccatcggtcataggcct

SEQ ID NO: 1133 - DNA, 20 bp, Artificial sequence
  Synthetic oligonucleotide
acgcagagctctgtgtgccc

SEQ ID NO: 1134 - DNA, 20 bp, Artificial sequence
  Synthetic oligonucleotide
ccacttatcacttctcagtt

SEQ ID NO: 1135 - DNA, 20 bp, Artificial sequence
  Synthetic oligonucleotide
gtggaagtcattctgtggaa

SEQ ID NO: 1136 - DNA, 20 bp, Artificial sequence
  Synthetic oligonucleotide
tcacacggccatctccttct

SEQ ID NO: 1137 - DNA, 20 bp, Artificial sequence
  Synthetic oligonucleotide
tgagtgcccaaaactacagc

SEQ ID NO: 1138 - DNA, 20 bp, Artificial sequence
  Synthetic oligonucleotide
ggctgctccacagtgggtat

SEQ ID NO: 1139 - DNA, 20 bp, Artificial sequence
  Synthetic oligonucleotide
gatcactgccctcccccttc

SEQ ID NO: 1140 - DNA, 20 bp, Artificial sequence
  Synthetic oligonucleotide
aggactattatacccagcca

SEQ ID NO: 1141 - DNA, 20 bp, Artificial sequence
  Synthetic oligonucleotide
agggcacccactccacccac

SEQ ID NO: 1142 - DNA, 20 bp, Artificial sequence
  Synthetic oligonucleotide
cctcactcccatgtcaggac

SEQ ID NO: 1143 - DNA, 20 bp, Artificial sequence
  Synthetic oligonucleotide
gtgacaaccacaccacacac

SEQ ID NO: 1144 - DNA, 20 bp, Artificial sequence
  Synthetic oligonucleotide
ctgtttcaaagctccagcta

SEQ ID NO: 1145 - DNA, 20 bp, Artificial sequence
  Synthetic oligonucleotide
actaaactcttcacctgggc

SEQ ID NO: 1146 - DNA, 20 bp, Artificial sequence
  Synthetic oligonucleotide
cccgatacctgccctagcgc

SEQ ID NO: 1147 - DNA, 20 bp, Artificial sequence
  Synthetic oligonucleotide
actgcccttttagagagcac

SEQ ID NO: 1148 - DNA, 20 bp, Artificial sequence
  Synthetic oligonucleotide
caccagggtcctcacccccc

SEQ ID NO: 1149 - DNA, 20 bp, Artificial sequence
  Synthetic oligonucleotide
gcccacagccctttcacggc

SEQ ID NO: 1150 - DNA, 20 bp, Artificial sequence
  Synthetic oligonucleotide
tcttacatccagtcgaggca

SEQ ID NO: 1151 - DNA, 20 bp, Artificial sequence
  Synthetic oligonucleotide
tactgaccccagcttgccat

SEQ ID NO: 1152 - DNA, 20 bp, Artificial sequence
  Synthetic oligonucleotide
gctcttggcatccacggtca

SEQ ID NO: 1153 - DNA, 20 bp, Artificial sequence
  Synthetic oligonucleotide
cccgagacaccatctggtaa

SEQ ID NO: 1154 - DNA, 20 bp, Artificial sequence
  Synthetic oligonucleotide
aacagcaccttgactagcac

SEQ ID NO: 1155 - DNA, 20 bp, Artificial sequence
  Synthetic oligonucleotide
cccaatgccccctagatgca

SEQ ID NO: 1156 - DNA, 20 bp, Artificial sequence
  Synthetic oligonucleotide
ggccgacaaccagatggaaa

SEQ ID NO: 1157 - DNA, 20 bp, Artificial sequence
  Synthetic oligonucleotide
gcacaggcacaaaatgcccc

SEQ ID NO: 1158 - DNA, 20 bp, Artificial sequence
  Synthetic oligonucleotide
ggctgcacaaaccctgccaa

SEQ ID NO: 1159 - DNA, 20 bp, Artificial sequence
  Synthetic oligonucleotide
cctaagggctttctcaccca

SEQ ID NO: 1160 - DNA, 20 bp, Artificial sequence
  Synthetic oligonucleotide
gtgattttcatctgcagggt

SEQ ID NO: 1161 - DNA, 20 bp, Artificial sequence
  Synthetic oligonucleotide
ccagggaacccctttccttg

SEQ ID NO: 1162 - DNA, 20 bp, Artificial sequence
  Synthetic oligonucleotide
tgcatccatttaatagaagt

SEQ ID NO: 1163 - DNA, 20 bp, Artificial sequence
  Synthetic oligonucleotide
gcttctatctcacacccgtc

SEQ ID NO: 1164 - DNA, 20 bp, Artificial sequence
  Synthetic oligonucleotide
cccattcctcctttgtataa

SEQ ID NO: 1165 - DNA, 20 bp, Artificial sequence
  Synthetic oligonucleotide
aagtgattaaaacattcgat

SEQ ID NO: 1166 - DNA, 20 bp, Artificial sequence
  Synthetic oligonucleotide
cttgccttcacttgcaggca

SEQ ID NO: 1167 - DNA, 20 bp, Artificial sequence
  Synthetic oligonucleotide
ccttggcctccagatacggc

SEQ ID NO: 1168 - DNA, 20 bp, Artificial sequence
  Synthetic oligonucleotide
gagacctctcctctgcttca

SEQ ID NO: 1169 - DNA, 20 bp, Artificial sequence
  Synthetic oligonucleotide
cttgactcaatcatgcaggt

SEQ ID NO: 1170 - DNA, 20 bp, Artificial sequence
  Synthetic oligonucleotide
actcacaattctcaaactgc

SEQ ID NO: 1171 - DNA, 20 bp, Artificial sequence
  Synthetic oligonucleotide
cctcgctttaccctcccaac

SEQ ID NO: 1172 - DNA, 20 bp, Artificial sequence
  Synthetic oligonucleotide
gcatggttctctctaggcgg

SEQ ID NO: 1173 - DNA, 20 bp, Artificial sequence
  Synthetic oligonucleotide
tctttatccttccactgggc

SEQ ID NO: 1174 - DNA, 20 bp, Artificial sequence
  Synthetic oligonucleotide
ccacagaactccagaagcaa

SEQ ID NO: 1175 - DNA, 20 bp, Artificial sequence
  Synthetic oligonucleotide
gtgacaaccacactcgagga

SEQ ID NO: 1176 - DNA, 20 bp, Artificial sequence
  Synthetic oligonucleotide
cacctggtgtccaaactcac

SEQ ID NO: 1177 - DNA, 20 bp, Artificial sequence
  Synthetic oligonucleotide
ggttaaaaaactctcctcac

SEQ ID NO: 1178 - DNA, 20 bp, Artificial sequence
  Synthetic oligonucleotide
gtgttgctcaactccagaga

SEQ ID NO: 1179 - DNA, 20 bp, Artificial sequence
  Synthetic oligonucleotide
cacttggacacagtgagcaa

SEQ ID NO: 1180 - DNA, 20 bp, Artificial sequence
  Synthetic oligonucleotide
tcacaattctcaaactgctc

SEQ ID NO: 1181 - DNA, 20 bp, Artificial sequence
  Synthetic oligonucleotide
tgcacaagaacttcctgcca

SEQ ID NO: 1182 - DNA, 20 bp, Artificial sequence
  Synthetic oligonucleotide
agtggcaccctccctctact

SEQ ID NO: 1183 - DNA, 20 bp, Artificial sequence
  Synthetic oligonucleotide
agtgcccaaaactacagcgg

SEQ ID NO: 1184 - DNA, 20 bp, Artificial sequence
  Synthetic oligonucleotide
gctgcttccaccaagattac

SEQ ID NO: 1185 - DNA, 20 bp, Artificial sequence
  Synthetic oligonucleotide
tccctttacctccccgtgga

SEQ ID NO: 1186 - DNA, 20 bp, Artificial sequence
  Synthetic oligonucleotide
ggctttctcacccagagccg

SEQ ID NO: 1187 - DNA, 20 bp, Artificial sequence
  Synthetic oligonucleotide
ggcctgaaccagctctatct

SEQ ID NO: 1188 - DNA, 20 bp, Artificial sequence
  Synthetic oligonucleotide
gcatccatttaatagaagtt

SEQ ID NO: 1189 - DNA, 20 bp, Artificial sequence
  Synthetic oligonucleotide
ggcaggtgcccatccaccca

SEQ ID NO: 1190 - DNA, 20 bp, Artificial sequence
  Synthetic oligonucleotide
tctgtggacctcaaccccct

SEQ ID NO: 1191 - DNA, 20 bp, Artificial sequence
  Synthetic oligonucleotide
gcgcacggccccatctgaac

SEQ ID NO: 1192 - DNA, 20 bp, Artificial sequence
  Synthetic oligonucleotide
cttggcctccagatacggcc

SEQ ID NO: 1193 - DNA, 20 bp, Artificial sequence
  Synthetic oligonucleotide
gttaaaaaactctcctcact

SEQ ID NO: 1194 - DNA, 20 bp, Artificial sequence
  Synthetic oligonucleotide
gaacagtccatcccagatga

SEQ ID NO: 1195 - DNA, 20 bp, Artificial sequence
  Synthetic oligonucleotide
cccacagccctttcacggcc

SEQ ID NO: 1196 - DNA, 20 bp, Artificial sequence
  Synthetic oligonucleotide
ccacacctgcctctcggctc

SEQ ID NO: 1197 - DNA, 20 bp, Artificial sequence
  Synthetic oligonucleotide
ggccttagtcctattgaatt

SEQ ID NO: 1198 - DNA, 20 bp, Artificial sequence
  Synthetic oligonucleotide
aggctgcaattcaacactgc

SEQ ID NO: 1199 - DNA, 20 bp, Artificial sequence
  Synthetic oligonucleotide
gctgagtaaggaaaatcccc

SEQ ID NO: 1200 - DNA, 20 bp, Artificial sequence
  Synthetic oligonucleotide
ggtcccctgtttactgatcc

SEQ ID NO: 1201 - DNA, 20 bp, Artificial sequence
  Synthetic oligonucleotide
gcccgttcttcccttaacca

SEQ ID NO: 1202 - DNA, 20 bp, Artificial sequence
  Synthetic oligonucleotide
ttcgatgtttcccaaagctc

SEQ ID NO: 1203 - DNA, 20 bp, Artificial sequence
  Synthetic oligonucleotide
atggccggcaccctcccccg

SEQ ID NO: 1204 - DNA, 20 bp, Artificial sequence
  Synthetic oligonucleotide
gagacattcacccagggctg

SEQ ID NO: 1205 - DNA, 20 bp, Artificial sequence
  Synthetic oligonucleotide
gacaagcggcccccaagcca

SEQ ID NO: 1206 - DNA, 20 bp, Artificial sequence
  Synthetic oligonucleotide
ggacgatccaccctggacag

SEQ ID NO: 1207 - DNA, 20 bp, Artificial sequence
  Synthetic oligonucleotide
acctggtgtccaaactcaca

SEQ ID NO: 1208 - DNA, 20 bp, Artificial sequence
  Synthetic oligonucleotide
caaagcttctcctctctgga

SEQ ID NO: 1209 - DNA, 20 bp, Artificial sequence
  Synthetic oligonucleotide
tgtcaggacagtcttagcca

SEQ ID NO: 1210 - DNA, 20 bp, Artificial sequence
  Synthetic oligonucleotide
gggaattacaacctgaagcc

SEQ ID NO: 1211 - DNA, 20 bp, Artificial sequence
  Synthetic oligonucleotide
gcggagagcccacacgccat

SEQ ID NO: 1212 - DNA, 20 bp, Artificial sequence
  Synthetic oligonucleotide
gctgggtgtttacccaagac

SEQ ID NO: 1213 - DNA, 20 bp, Artificial sequence
  Synthetic oligonucleotide
actcggtctttctcctccca

SEQ ID NO: 1214 - DNA, 20 bp, Artificial sequence
  Synthetic oligonucleotide
gccatacccatcgatgcaat

SEQ ID NO: 1215 - DNA, 20 bp, Artificial sequence
  Synthetic oligonucleotide
ccctcaacccccatgcacgc

SEQ ID NO: 1216 - DNA, 20 bp, Artificial sequence
  Synthetic oligonucleotide
gtgacgagcacccagtggga

SEQ ID NO: 1217 - DNA, 20 bp, Artificial sequence
  Synthetic oligonucleotide
cacttcccaccacaaggcgc

SEQ ID NO: 1218 - DNA, 20 bp, Artificial sequence
  Synthetic oligonucleotide
cagaactcgattcacaggta

SEQ ID NO: 1219 - DNA, 20 bp, Artificial sequence
  Synthetic oligonucleotide
cgcctgagcactcttacgca

SEQ ID NO: 1220 - DNA, 20 bp, Artificial sequence
  Synthetic oligonucleotide
tctgaggccatcttgaggga

SEQ ID NO: 1221 - DNA, 20 bp, Artificial sequence
  Synthetic oligonucleotide
ggagagggccacccttcagc

SEQ ID NO: 1222 - DNA, 20 bp, Artificial sequence
  Synthetic oligonucleotide
tctaccccagacaatccacc

SEQ ID NO: 1223 - DNA, 20 bp, Artificial sequence
  Synthetic oligonucleotide
tgttgctcaactccagagaa

SEQ ID NO: 1224 - DNA, 20 bp, Artificial sequence
  Synthetic oligonucleotide
gcaaacacccctgaaagaca

SEQ ID NO: 1225 - DNA, 20 bp, Artificial sequence
  Synthetic oligonucleotide
taggcggacagcaaaagcct

SEQ ID NO: 1226 - DNA, 20 bp, Artificial sequence
  Synthetic oligonucleotide
tgggtcagcctccaagaggc

SEQ ID NO: 1227 - DNA, 20 bp, Artificial sequence
  Synthetic oligonucleotide
ctaaactcttcacctgggca

SEQ ID NO: 1228 - DNA, 20 bp, Artificial sequence
  Synthetic oligonucleotide
aggctggcatctctaaggca

SEQ ID NO: 1229 - DNA, 20 bp, Artificial sequence
  Synthetic oligonucleotide
atccgcagcatccaaaccca

SEQ ID NO: 1230 - DNA, 20 bp, Artificial sequence
  Synthetic oligonucleotide
cctaaaagtcctatctgccc

SEQ ID NO: 1231 - DNA, 20 bp, Artificial sequence
  Synthetic oligonucleotide
ccatggcgaacaacttgtcc

SEQ ID NO: 1232 - DNA, 20 bp, Artificial sequence
  Synthetic oligonucleotide
gtcgaggcaatttctcagga

SEQ ID NO: 1233 - DNA, 20 bp, Artificial sequence
  Synthetic oligonucleotide
ccagggcccatccctgaccg

SEQ ID NO: 1234 - DNA, 20 bp, Artificial sequence
  Synthetic oligonucleotide
gttgggagaaaaacaaccac

SEQ ID NO: 1235 - DNA, 20 bp, Artificial sequence
  Synthetic oligonucleotide
ttatgacacccattctggac

SEQ ID NO: 1236 - DNA, 20 bp, Artificial sequence
  Synthetic oligonucleotide
cacttatcacttctcagttc

SEQ ID NO: 1237 - DNA, 20 bp, Artificial sequence
  Synthetic oligonucleotide
accttgactagcacaagccc

SEQ ID NO: 1238 - DNA, 20 bp, Artificial sequence
  Synthetic oligonucleotide
ccagcacaccccatctcagt

SEQ ID NO: 1239 - DNA, 20 bp, Artificial sequence
  Synthetic oligonucleotide
gctgagatagaaacaatggc

SEQ ID NO: 1240 - DNA, 20 bp, Artificial sequence
  Synthetic oligonucleotide
tttcaaagctccagctacac

SEQ ID NO: 1241 - DNA, 20 bp, Artificial sequence
  Synthetic oligonucleotide
cccacggccacacctgtgtc

SEQ ID NO: 1242 - DNA, 20 bp, Artificial sequence
  Synthetic oligonucleotide
gtccagccccactctaccct

SEQ ID NO: 1243 - DNA, 20 bp, Artificial sequence
  Synthetic oligonucleotide
atccacggtcactcccgcct

SEQ ID NO: 1244 - DNA, 20 bp, Artificial sequence
  Synthetic oligonucleotide
caatgccccctagatgcagt

SEQ ID NO: 1245 - DNA, 20 bp, Artificial sequence
  Synthetic oligonucleotide
atccaagtaaacatcgccag

SEQ ID NO: 1246 - DNA, 20 bp, Artificial sequence
  Synthetic oligonucleotide
ccagacgcaccgtcacacat

SEQ ID NO: 1247 - DNA, 20 bp, Artificial sequence
  Synthetic oligonucleotide
gagggtccaccatcaggtcc

SEQ ID NO: 1248 - DNA, 20 bp, Artificial sequence
  Synthetic oligonucleotide
tcctcaccccccaattccta

SEQ ID NO: 1249 - DNA, 20 bp, Artificial sequence
  Synthetic oligonucleotide
ccttccccccacgccagcat

SEQ ID NO: 1250 - DNA, 20 bp, Artificial sequence
  Synthetic oligonucleotide
tctccagcgactctgaacct

SEQ ID NO: 1251 - DNA, 20 bp, Artificial sequence
  Synthetic oligonucleotide
ctttatccttccactgggcc

SEQ ID NO: 1252 - DNA, 20 bp, Artificial sequence
  Synthetic oligonucleotide
ctcgctttaccctcccaaca

SEQ ID NO: 1253 - DNA, 20 bp, Artificial sequence
  Synthetic oligonucleotide
ccatctccttctgcctgtta

SEQ ID NO: 1254 - DNA, 20 bp, Artificial sequence
  Synthetic oligonucleotide
tgccgtcctccacatccaca

SEQ ID NO: 1255 - DNA, 20 bp, Artificial sequence
  Synthetic oligonucleotide
cttctatctcacacccgtca

SEQ ID NO: 1256 - DNA, 20 bp, Artificial sequence
  Synthetic oligonucleotide
ggcagaagcccccaactcac

SEQ ID NO: 1257 - DNA, 20 bp, Artificial sequence
  Synthetic oligonucleotide
aaagcttctcctctctggac

SEQ ID NO: 1258 - DNA, 20 bp, Artificial sequence
  Synthetic oligonucleotide
cgtggctcacctaccgtggc

SEQ ID NO: 1259 - DNA, 20 bp, Artificial sequence
  Synthetic oligonucleotide
gccgtcctccacatccacac

SEQ ID NO: 1260 - DNA, 20 bp, Artificial sequence
  Synthetic oligonucleotide
ggacagtccacctagatggt

SEQ ID NO: 1261 - DNA, 20 bp, Artificial sequence
  Synthetic oligonucleotide
cccacgccagcatccaggaa

SEQ ID NO: 1262 - DNA, 20 bp, Artificial sequence
  Synthetic oligonucleotide
agcaaaagcctctgctgtcc

SEQ ID NO: 1263 - DNA, 20 bp, Artificial sequence
  Synthetic oligonucleotide
ctggcaagaccacgaagcca

SEQ ID NO: 1264 - DNA, 20 bp, Artificial sequence
  Synthetic oligonucleotide
gttccgtgaatttccctgaa

SEQ ID NO: 1265 - DNA, 20 bp, Artificial sequence
  Synthetic oligonucleotide
ggagagcccacacgccatac

SEQ ID NO: 1266 - DNA, 20 bp, Artificial sequence
  Synthetic oligonucleotide
gcaggtgcccatccacccac

SEQ ID NO: 1267 - DNA, 20 bp, Artificial sequence
  Synthetic oligonucleotide
ccacagccctttcacggcct

SEQ ID NO: 1268 - DNA, 20 bp, Artificial sequence
  Synthetic oligonucleotide
ctaaaagtcctatctgccca

SEQ ID NO: 1269 - DNA, 20 bp, Artificial sequence
  Synthetic oligonucleotide
tgagatagaaacaatggcct

SEQ ID NO: 1270 - DNA, 20 bp, Artificial sequence
  Synthetic oligonucleotide
aaaaaactctcctcactagc

SEQ ID NO: 1271 - DNA, 20 bp, Artificial sequence
  Synthetic oligonucleotide
aaactcttcacctgggcatt

SEQ ID NO: 1272 - DNA, 20 bp, Artificial sequence
  Synthetic oligonucleotide
tccagcgactctgaacctct

SEQ ID NO: 1273 - DNA, 20 bp, Artificial sequence
  Synthetic oligonucleotide
ggctgcaattcaacactgcc

SEQ ID NO: 1274 - DNA, 20 bp, Artificial sequence
  Synthetic oligonucleotide
cacacctgcctctcggctct

SEQ ID NO: 1275 - DNA, 20 bp, Artificial sequence
  Synthetic oligonucleotide
cagggcccatccctgaccga

SEQ ID NO: 1276 - DNA, 20 bp, Artificial sequence
  Synthetic oligonucleotide
ccagctctatcttcccagac

SEQ ID NO: 1277 - DNA, 20 bp, Artificial sequence
  Synthetic oligonucleotide
gcctgagcactcttacgcat

SEQ ID NO: 1278 - DNA, 20 bp, Artificial sequence
  Synthetic oligonucleotide
aacagtccatcccagatgac

SEQ ID NO: 1279 - DNA, 20 bp, Artificial sequence
  Synthetic oligonucleotide
gcttccaccaagattaccct

SEQ ID NO: 1280 - DNA, 20 bp, Artificial sequence
  Synthetic oligonucleotide
tcatggtgcccacccccaca

SEQ ID NO: 1281 - DNA, 20 bp, Artificial sequence
  Synthetic oligonucleotide
acacagccccacccctgcgg

SEQ ID NO: 1282 - DNA, 20 bp, Artificial sequence
  Synthetic oligonucleotide
gaggccttgcccaacagggc

SEQ ID NO: 1283 - DNA, 20 bp, Artificial sequence
  Synthetic oligonucleotide
cccactctaccctctggcat

SEQ ID NO: 1284 - DNA, 20 bp, Artificial sequence
  Synthetic oligonucleotide
aggccactccacttcttgga

SEQ ID NO: 1285 - DNA, 20 bp, Artificial sequence
  Synthetic oligonucleotide
gtggacctcaaccccctact

SEQ ID NO: 1286 - DNA, 20 bp, Artificial sequence
  Synthetic oligonucleotide
gctttaccctcccaacaggt

SEQ ID NO: 1287 - DNA, 20 bp, Artificial sequence
  Synthetic oligonucleotide
aactgactccaggatcccta

SEQ ID NO: 1288 - DNA, 20 bp, Artificial sequence
  Synthetic oligonucleotide
ttcaaagctccagctacacc

SEQ ID NO: 1289 - DNA, 20 bp, Artificial sequence
  Synthetic oligonucleotide
ttaatagaagtttccagcgc

SEQ ID NO: 1290 - DNA, 20 bp, Artificial sequence
  Synthetic oligonucleotide
gcagggaaccccaccacatc

SEQ ID NO: 1291 - DNA, 20 bp, Artificial sequence
  Synthetic oligonucleotide
ggccaccagctcatttcact

SEQ ID NO: 1292 - DNA, 20 bp, Artificial sequence
  Synthetic oligonucleotide
agcacaccccatctcagtga

SEQ ID NO: 1293 - DNA, 20 bp, Artificial sequence
  Synthetic oligonucleotide
cgttcttcccttaaccacct

SEQ ID NO: 1294 - DNA, 20 bp, Artificial sequence
  Synthetic oligonucleotide
tccgcagcatccaaacccac

SEQ ID NO: 1295 - DNA, 20 bp, Artificial sequence
  Synthetic oligonucleotide
gccttagtcctattgaatta

SEQ ID NO: 1296 - DNA, 20 bp, Artificial sequence
  Synthetic oligonucleotide
tcgatgtttcccaaagctca

SEQ ID NO: 1297 - DNA, 20 bp, Artificial sequence
  Synthetic oligonucleotide
ccccaagccacctggaacca

SEQ ID NO: 1298 - DNA, 20 bp, Artificial sequence
  Synthetic oligonucleotide
ggccatttctcaggctggcc

SEQ ID NO: 1299 - DNA, 20 bp, Artificial sequence
  Synthetic oligonucleotide
cccgcctgaatcccccacgc

SEQ ID NO: 1300 - DNA, 20 bp, Artificial sequence
  Synthetic oligonucleotide
gacaatccaccccagagggt

SEQ ID NO: 1301 - DNA, 20 bp, Artificial sequence
  Synthetic oligonucleotide
ggtctgagcacacgctccta

SEQ ID NO: 1302 - DNA, 20 bp, Artificial sequence
  Synthetic oligonucleotide
ctcggtctttctcctcccac

SEQ ID NO: 1303 - DNA, 20 bp, Artificial sequence
  Synthetic oligonucleotide
acttcccaccacaaggcgca

SEQ ID NO: 1304 - DNA, 20 bp, Artificial sequence
  Synthetic oligonucleotide
tccaagtaaacatcgccagt

SEQ ID NO: 1305 - DNA, 20 bp, Artificial sequence
  Synthetic oligonucleotide
aggacagtcttagccaccaa

SEQ ID NO: 1306 - DNA, 20 bp, Artificial sequence
  Synthetic oligonucleotide
gatggacgatatctcctgga

SEQ ID NO: 1307 - DNA, 20 bp, Artificial sequence
  Synthetic oligonucleotide
tatgacacccattctggaca

SEQ ID NO: 1308 - DNA, 20 bp, Artificial sequence
  Synthetic oligonucleotide
ttggcctccagatacggcca

SEQ ID NO: 1309 - DNA, 20 bp, Artificial sequence
  Synthetic oligonucleotide
gagagggccacccttcagcc

SEQ ID NO: 1310 - DNA, 20 bp, Artificial sequence
  Synthetic oligonucleotide
accacagccacctcaaagat

SEQ ID NO: 1311 - DNA, 20 bp, Artificial sequence
  Synthetic oligonucleotide
ttctatctcacacccgtcac

SEQ ID NO: 1312 - DNA, 20 bp, Artificial sequence
  Synthetic oligonucleotide
ctcaccccccaattcctacc

SEQ ID NO: 1313 - DNA, 20 bp, Artificial sequence
  Synthetic oligonucleotide
aggtctcttccctcagggac

SEQ ID NO: 1314 - DNA, 20 bp, Artificial sequence
  Synthetic oligonucleotide
tgtgcataacacaaatattg

SEQ ID NO: 1315 - DNA, 20 bp, Artificial sequence
  Synthetic oligonucleotide
agtgagctcccaactctgtc

SEQ ID NO: 1316 - DNA, 20 bp, Artificial sequence
  Synthetic oligonucleotide
ggtgtccaaactcacaggct

SEQ ID NO: 1317 - DNA, 20 bp, Artificial sequence
  Synthetic oligonucleotide
tcacaggtaaaagacacgac

SEQ ID NO: 1318 - DNA, 20 bp, Artificial sequence
  Synthetic oligonucleotide
gagcaatgcccacaaaggtg

SEQ ID NO: 1319 - DNA, 20 bp, Artificial sequence
  Synthetic oligonucleotide
gtcttctgcttccttcagaa

SEQ ID NO: 1320 - DNA, 20 bp, Artificial sequence
  Synthetic oligonucleotide
taaattggcattaatgtctt

SEQ ID NO: 1321 - DNA, 20 bp, Artificial sequence
  Synthetic oligonucleotide
cgcacggccccatctgaact

SEQ ID NO: 1322 - DNA, 20 bp, Artificial sequence
  Synthetic oligonucleotide
gggctcagccctttcagacc

SEQ ID NO: 1323 - DNA, 20 bp, Artificial sequence
  Synthetic oligonucleotide
ggcaccctccctctactggc

SEQ ID NO: 1324 - DNA, 20 bp, Artificial sequence
  Synthetic oligonucleotide
gtgcccaaaactacagcggt

SEQ ID NO: 1325 - DNA, 20 bp, Artificial sequence
  Synthetic oligonucleotide
ccacggccacacctgtgtct

SEQ ID NO: 1326 - DNA, 20 bp, Artificial sequence
  Synthetic oligonucleotide
aacctgaagcccaaacggtt

SEQ ID NO: 1327 - DNA, 20 bp, Artificial sequence
  Synthetic oligonucleotide
gtcacctgttttactgagcc

SEQ ID NO: 1328 - DNA, 20 bp, Artificial sequence
  Synthetic oligonucleotide
gggtgtttacccaagacagc

SEQ ID NO: 1329 - DNA, 20 bp, Artificial sequence
  Synthetic oligonucleotide
gtctgcgcacagctgagctt

SEQ ID NO: 1330 - DNA, 20 bp, Artificial sequence
  Synthetic oligonucleotide
cacaattctcaaactgctcc

SEQ ID NO: 1331 - DNA, 20 bp, Artificial sequence
  Synthetic oligonucleotide
ccgaagctctaatccctggc

SEQ ID NO: 1332 - DNA, 20 bp, Artificial sequence
  Synthetic oligonucleotide
gttgctcaactccagagaac

SEQ ID NO: 1333 - DNA, 20 bp, Artificial sequence
  Synthetic oligonucleotide
tggcaagaccacgaagccaa

SEQ ID NO: 1334 - DNA, 20 bp, Artificial sequence
  Synthetic oligonucleotide
cccaaagctcacaacactca

SEQ ID NO: 1335 - DNA, 20 bp, Artificial sequence
  Synthetic oligonucleotide
gtggctcacctaccgtggcc

SEQ ID NO: 1336 - DNA, 20 bp, Artificial sequence
  Synthetic oligonucleotide
ggctggccccacatgcaggc

SEQ ID NO: 1337 - DNA, 20 bp, Artificial sequence
  Synthetic oligonucleotide
ccctggtgccttctacaggc

SEQ ID NO: 1338 - DNA, 20 bp, Artificial sequence
  Synthetic oligonucleotide
cagcgactctgaacctctgc

SEQ ID NO: 1339 - DNA, 20 bp, Artificial sequence
  Synthetic oligonucleotide
ctttaccctcccaacaggtt

SEQ ID NO: 1340 - DNA, 20 bp, Artificial sequence
  Synthetic oligonucleotide
ctccaggatccctatgggct

SEQ ID NO: 1341 - DNA, 20 bp, Artificial sequence
  Synthetic oligonucleotide
aggcaccaccagatgccaca

SEQ ID NO: 1342 - DNA, 20 bp, Artificial sequence
  Synthetic oligonucleotide
cggtctttctcctcccacca

SEQ ID NO: 1343 - DNA, 20 bp, Artificial sequence
  Synthetic oligonucleotide
aaaaactctcctcactagcc

SEQ ID NO: 1344 - DNA, 20 bp, Artificial sequence
  Synthetic oligonucleotide
ggctcagccctttcagacct

SEQ ID NO: 1345 - DNA, 20 bp, Artificial sequence
  Synthetic oligonucleotide
tgtcccagaccatcatcgat

SEQ ID NO: 1346 - DNA, 20 bp, Artificial sequence
  Synthetic oligonucleotide
acgcacccctctcacatgcc

SEQ ID NO: 1347 - DNA, 20 bp, Artificial sequence
  Synthetic oligonucleotide
gggaaaccccccaagtcctc

SEQ ID NO: 1348 - DNA, 20 bp, Artificial sequence
  Synthetic oligonucleotide
tcaccccccaattcctacct

SEQ ID NO: 1349 - DNA, 20 bp, Artificial sequence
  Synthetic oligonucleotide
tggacctcaaccccctactt

SEQ ID NO: 1350 - DNA, 20 bp, Artificial sequence
  Synthetic oligonucleotide
ccgcctgaatcccccacgcc

SEQ ID NO: 1351 - DNA, 20 bp, Artificial sequence
  Synthetic oligonucleotide
gtgtccaaactcacaggcta

SEQ ID NO: 1352 - DNA, 20 bp, Artificial sequence
  Synthetic oligonucleotide
gtgcataacacaaatattgc

SEQ ID NO: 1353 - DNA, 20 bp, Artificial sequence
  Synthetic oligonucleotide
accaagattaccctcaggat

SEQ ID NO: 1354 - DNA, 20 bp, Artificial sequence
  Synthetic oligonucleotide
gcacaccccatctcagtgac

SEQ ID NO: 1355 - DNA, 20 bp, Artificial sequence
  Synthetic oligonucleotide
atgacacccattctggacat

SEQ ID NO: 1356 - DNA, 20 bp, Artificial sequence
  Synthetic oligonucleotide
gcaccctccctctactggca

SEQ ID NO: 1357 - DNA, 20 bp, Artificial sequence
  Synthetic oligonucleotide
tctgctgtccactcctgaac

SEQ ID NO: 1358 - DNA, 20 bp, Artificial sequence
  Synthetic oligonucleotide
gctgcaattcaacactgcct

SEQ ID NO: 1359 - DNA, 20 bp, Artificial sequence
  Synthetic oligonucleotide
cggaggctgcccattagctg

SEQ ID NO: 1360 - DNA, 20 bp, Artificial sequence
  Synthetic oligonucleotide
aaacaggtgcattctagggt

SEQ ID NO: 1361 - DNA, 20 bp, Artificial sequence
  Synthetic oligonucleotide
acctggtgcacctggagtca

SEQ ID NO: 1362 - DNA, 20 bp, Artificial sequence
  Synthetic oligonucleotide
gccctgctcagcacgaagcc

SEQ ID NO: 1363 - DNA, 20 bp, Artificial sequence
  Synthetic oligonucleotide
tggacaggccattcccactc

SEQ ID NO: 1364 - DNA, 20 bp, Artificial sequence
  Synthetic oligonucleotide
gcccacacgccatacagtta

SEQ ID NO: 1365 - DNA, 20 bp, Artificial sequence
  Synthetic oligonucleotide
ggacattcccagcattgacc

SEQ ID NO: 1366 - DNA, 20 bp, Artificial sequence
  Synthetic oligonucleotide
cgaagctctaatccctggcc

SEQ ID NO: 1367 - DNA, 20 bp, Artificial sequence
  Synthetic oligonucleotide
cacaggtaaaagacacgaca

SEQ ID NO: 1368 - DNA, 20 bp, Artificial sequence
  Synthetic oligonucleotide
ggccgtgtcctcccaagcct

SEQ ID NO: 1369 - DNA, 20 bp, Artificial sequence
  Synthetic oligonucleotide
agtcttagccaccaaggcct

SEQ ID NO: 1370 - DNA, 20 bp, Artificial sequence
  Synthetic oligonucleotide
ggacgggtccccatcttgcc

SEQ ID NO: 1371 - DNA, 20 bp, Artificial sequence
  Synthetic oligonucleotide
gtgtttacccaagacagcta

SEQ ID NO: 1372 - DNA, 20 bp, Artificial sequence
  Synthetic oligonucleotide
cagggaaccccaccacatca

SEQ ID NO: 1373 - DNA, 20 bp, Artificial sequence
  Synthetic oligonucleotide
acacccgtcaccctctgcac

SEQ ID NO: 1374 - DNA, 20 bp, Artificial sequence
  Synthetic oligonucleotide
gtcccaggcttctcttggga

SEQ ID NO: 1375 - DNA, 20 bp, Artificial sequence
  Synthetic oligonucleotide
gtgttctgttttacactaat

SEQ ID NO: 1376 - DNA, 20 bp, Artificial sequence
  Synthetic oligonucleotide
gtgagatccacactccagaa

SEQ ID NO: 1377 - DNA, 20 bp, Artificial sequence
  Synthetic oligonucleotide
tgcccaaaactacagcggtc

SEQ ID NO: 1378 - DNA, 20 bp, Artificial sequence
  Synthetic oligonucleotide
cgccagggcagaattacctt

SEQ ID NO: 1379 - DNA, 20 bp, Artificial sequence
  Synthetic oligonucleotide
gcaatgcccacaaaggtggc

SEQ ID NO: 1380 - DNA, 20 bp, Artificial sequence
  Synthetic oligonucleotide
gcagaagcccccaactcact

SEQ ID NO: 1381 - DNA, 20 bp, Artificial sequence
  Synthetic oligonucleotide
tcaaagctccagctacacct

SEQ ID NO: 1382 - DNA, 20 bp, Artificial sequence
  Synthetic oligonucleotide
ttgctcaactccagagaacc

SEQ ID NO: 1383 - DNA, 20 bp, Artificial sequence
  Synthetic oligonucleotide
ccttaattacctctaaagaa

SEQ ID NO: 1384 - DNA, 20 bp, Artificial sequence
  Synthetic oligonucleotide
tcccagtgcctcacacgcgg

SEQ ID NO: 1385 - DNA, 20 bp, Artificial sequence
  Synthetic oligonucleotide
cagctctatcttcccagaca

SEQ ID NO: 1386 - DNA, 20 bp, Artificial sequence
  Synthetic oligonucleotide
aagcttctcctctctggaca

SEQ ID NO: 1387 - DNA, 20 bp, Artificial sequence
  Synthetic oligonucleotide
tcacctgttttactgagcct

SEQ ID NO: 1388 - DNA, 20 bp, Artificial sequence
  Synthetic oligonucleotide
gccaccagctcatttcactc

SEQ ID NO: 1389 - DNA, 20 bp, Artificial sequence
  Synthetic oligonucleotide
ccactctaccctctggcatc

SEQ ID NO: 1390 - DNA, 20 bp, Artificial sequence
  Synthetic oligonucleotide
ggtgggctcattattagagc

SEQ ID NO: 1391 - DNA, 20 bp, Artificial sequence
  Synthetic oligonucleotide
gcagcatccaaacccacggt

SEQ ID NO: 1392 - DNA, 20 bp, Artificial sequence
  Synthetic oligonucleotide
caacagttctccctgctgac

SEQ ID NO: 1393 - DNA, 20 bp, Artificial sequence
  Synthetic oligonucleotide
tgcccatccacccacttgga

SEQ ID NO: 1394 - DNA, 20 bp, Artificial sequence
  Synthetic oligonucleotide
agagggtccaccccagacag

SEQ ID NO: 1395 - DNA, 20 bp, Artificial sequence
  Synthetic oligonucleotide
agcaggcctccccattgtcc

SEQ ID NO: 1396 - DNA, 20 bp, Artificial sequence
  Synthetic oligonucleotide
atctgcccagaacctcgcca

SEQ ID NO: 1397 - DNA, 20 bp, Artificial sequence
  Synthetic oligonucleotide
gcagagggtcccatgaggct

SEQ ID NO: 1398 - DNA, 20 bp, Artificial sequence
  Synthetic oligonucleotide
cctgagcactcttacgcata

SEQ ID NO: 1399 - DNA, 20 bp, Artificial sequence
  Synthetic oligonucleotide
ccccaaagtctcccccctac

SEQ ID NO: 1400 - DNA, 20 bp, Artificial sequence
  Synthetic oligonucleotide
cacagccacctcaaagatga

SEQ ID NO: 1401 - DNA, 20 bp, Artificial sequence
  Synthetic oligonucleotide
gcaggacaatttctaggtac

SEQ ID NO: 1402 - DNA, 20 bp, Artificial sequence
  Synthetic oligonucleotide
ttcccttaaccacctgtgca

SEQ ID NO: 1403 - DNA, 20 bp, Artificial sequence
  Synthetic oligonucleotide
acagtccacctagatggtcc

SEQ ID NO: 1404 - DNA, 20 bp, Artificial sequence
  Synthetic oligonucleotide
cctgaccgacacctgtccca

SEQ ID NO: 1405 - DNA, 20 bp, Artificial sequence
  Synthetic oligonucleotide
gcacggccccatctgaactc

SEQ ID NO: 1406 - DNA, 20 bp, Artificial sequence
  Synthetic oligonucleotide
agtccatcccagatgaccca

SEQ ID NO: 1407 - DNA, 20 bp, Artificial sequence
  Synthetic oligonucleotide
gtgagctcccaactctgtcc

SEQ ID NO: 1408 - DNA, 20 bp, Artificial sequence
  Synthetic oligonucleotide
gagcacacgctcctatgcat

SEQ ID NO: 1409 - DNA, 20 bp, Artificial sequence
  Synthetic oligonucleotide
cagagagactccacctgtcc

SEQ ID NO: 1410 - DNA, 20 bp, Artificial sequence
  Synthetic oligonucleotide
cccaggccccatgtgtggtc

SEQ ID NO: 1411 - DNA, 20 bp, Artificial sequence
  Synthetic oligonucleotide
accacagcctagaccaggct

SEQ ID NO: 1412 - DNA, 20 bp, Artificial sequence
  Synthetic oligonucleotide
ctggacagttcaccccagat

SEQ ID NO: 1413 - DNA, 20 bp, Artificial sequence
  Synthetic oligonucleotide
gtcttacttcttaatggaga

SEQ ID NO: 1414 - DNA, 20 bp, Artificial sequence
  Synthetic oligonucleotide
ggctgaggtttctacagcca

SEQ ID NO: 1415 - DNA, 20 bp, Artificial sequence
  Synthetic oligonucleotide
aagctcacaacactcagggt

SEQ ID NO: 1416 - DNA, 20 bp, Artificial sequence
  Synthetic oligonucleotide
atattgccattttaaccctc

SEQ ID NO: 1417 - DNA, 20 bp, Artificial sequence
  Synthetic oligonucleotide
gcagagtcccaccaccaaga

SEQ ID NO: 1418 - DNA, 20 bp, Artificial sequence
  Synthetic oligonucleotide
aggccattcccactcgctgt

SEQ ID NO: 1419 - DNA, 20 bp, Artificial sequence
  Synthetic oligonucleotide
cccatccacccacttggaca

SEQ ID NO: 1420 - DNA, 20 bp, Artificial sequence
  Synthetic oligonucleotide
actctgtccacttcctccac

SEQ ID NO: 1421 - DNA, 20 bp, Artificial sequence
  Synthetic oligonucleotide
gaaagttgcccactcctgta

SEQ ID NO: 1422 - DNA, 20 bp, Artificial sequence
  Synthetic oligonucleotide
gggttcgcccttactcatca

SEQ ID NO: 1423 - DNA, 20 bp, Artificial sequence
  Synthetic oligonucleotide
ctgttttacactaatgcggg

SEQ ID NO: 1424 - DNA, 20 bp, Artificial sequence
  Synthetic oligonucleotide
gcacccctctcacatgcccg

SEQ ID NO: 1425 - DNA, 20 bp, Artificial sequence
  Synthetic oligonucleotide
aaactctcctcactagcctg

SEQ ID NO: 1426 - DNA, 20 bp, Artificial sequence
  Synthetic oligonucleotide
agtgacactcaaaagtgctc

SEQ ID NO: 1427 - DNA, 20 bp, Artificial sequence
  Synthetic oligonucleotide
ccaaggagacctcactgctc

SEQ ID NO: 1428 - DNA, 20 bp, Artificial sequence
  Synthetic oligonucleotide
tggctgacccccgccagggc

SEQ ID NO: 1429 - DNA, 20 bp, Artificial sequence
  Synthetic oligonucleotide
gatgcgggccaggctaggcc

SEQ ID NO: 1430 - DNA, 20 bp, Artificial sequence
  Synthetic oligonucleotide
gccactctccctccaataga

SEQ ID NO: 1431 - DNA, 20 bp, Artificial sequence
  Synthetic oligonucleotide
agacagtccaccctggatga

SEQ ID NO: 1432 - DNA, 20 bp, Artificial sequence
  Synthetic oligonucleotide
tctatcttcccagacacact

SEQ ID NO: 1433 - DNA, 20 bp, Artificial sequence
  Synthetic oligonucleotide
tagtcatacacagatggcca

SEQ ID NO: 1434 - DNA, 20 bp, Artificial sequence
  Synthetic oligonucleotide
cgggtccccatcttgcctac

SEQ ID NO: 1435 - DNA, 20 bp, Artificial sequence
  Synthetic oligonucleotide
gcaccgggcacagatcccac

SEQ ID NO: 1436 - DNA, 20 bp, Artificial sequence
  Synthetic oligonucleotide
ccgggctcccatgaatgtcc

SEQ ID NO: 1437 - DNA, 20 bp, Artificial sequence
  Synthetic oligonucleotide
gggctttgatatataaatct

SEQ ID NO: 1438 - DNA, 20 bp, Artificial sequence
  Synthetic oligonucleotide
gccaaggaacatcagggcga

SEQ ID NO: 1439 - DNA, 20 bp, Artificial sequence
  Synthetic oligonucleotide
tggccggaacacactttcac

SEQ ID NO: 1440 - DNA, 20 bp, Artificial sequence
  Synthetic oligonucleotide
caggcctccccattgtccat

SEQ ID NO: 1441 - DNA, 20 bp, Artificial sequence
  Synthetic oligonucleotide
gccctagcttccccagagca

SEQ ID NO: 1442 - DNA, 20 bp, Artificial sequence
  Synthetic oligonucleotide
caagattaccctcaggatca

SEQ ID NO: 1443 - DNA, 20 bp, Artificial sequence
  Synthetic oligonucleotide
gtctgagacccatctgggtc

SEQ ID NO: 1444 - DNA, 20 bp, Artificial sequence
  Synthetic oligonucleotide
tctctgccagccctaactta

SEQ ID NO: 1445 - DNA, 20 bp, Artificial sequence
  Synthetic oligonucleotide
agcacgagtaccctctgcca

SEQ ID NO: 1446 - DNA, 20 bp, Artificial sequence
  Synthetic oligonucleotide
agctgctaaaagaaatgcca

SEQ ID NO: 1447 - DNA, 20 bp, Artificial sequence
  Synthetic oligonucleotide
ctcaaccccctacttggtct

SEQ ID NO: 1448 - DNA, 20 bp, Artificial sequence
  Synthetic oligonucleotide
acccgtcaccctctgcacca

SEQ ID NO: 1449 - DNA, 20 bp, Artificial sequence
  Synthetic oligonucleotide
ctcacaggctactcccccca

SEQ ID NO: 1450 - DNA, 20 bp, Artificial sequence
  Synthetic oligonucleotide
ggtcccctccttctcccatc

SEQ ID NO: 1451 - DNA, 20 bp, Artificial sequence
  Synthetic oligonucleotide
acgctcctccagctgagcct

SEQ ID NO: 1452 - DNA, 20 bp, Artificial sequence
  Synthetic oligonucleotide
tgcaattcaacactgcctta

SEQ ID NO: 1453 - DNA, 20 bp, Artificial sequence
  Synthetic oligonucleotide
tttgaggaaatctacgggta

SEQ ID NO: 1454 - DNA, 20 bp, Artificial sequence
  Synthetic oligonucleotide
tgaatcccccacgccaggcc

SEQ ID NO: 1455 - DNA, 20 bp, Artificial sequence
  Synthetic oligonucleotide
gctgtacccacaggcggcac

SEQ ID NO: 1456 - DNA, 20 bp, Artificial sequence
  Synthetic oligonucleotide
acaggctccattgagaggct

SEQ ID NO: 1457 - DNA, 20 bp, Artificial sequence
  Synthetic oligonucleotide
atgttaaatataaccacccc

SEQ ID NO: 1458 - DNA, 20 bp, Artificial sequence
  Synthetic oligonucleotide
cccgcacccacctctggtgc

SEQ ID NO: 1459 - DNA, 20 bp, Artificial sequence
  Synthetic oligonucleotide
tggagtggagactcatccca

SEQ ID NO: 1460 - DNA, 20 bp, Artificial sequence
  Synthetic oligonucleotide
actgagttcaacaagatgaa

SEQ ID NO: 1461 - DNA, 20 bp, Artificial sequence
  Synthetic oligonucleotide
gccccactcaccatgcagac

SEQ ID NO: 1462 - DNA, 20 bp, Artificial sequence
  Synthetic oligonucleotide
gcggtctcttctctctgttc

SEQ ID NO: 1463 - DNA, 20 bp, Artificial sequence
  Synthetic oligonucleotide
gatgaattattcccatgggc

SEQ ID NO: 1464 - DNA, 20 bp, Artificial sequence
  Synthetic oligonucleotide
ccttggcattcactgagcct

SEQ ID NO: 1465 - DNA, 20 bp, Artificial sequence
  Synthetic oligonucleotide
tcctgacaccccaccaacgc

SEQ ID NO: 1466 - DNA, 20 bp, Artificial sequence
  Synthetic oligonucleotide
tgctgtccactcctgaacac

SEQ ID NO: 1467 - DNA, 20 bp, Artificial sequence
  Synthetic oligonucleotide
gtcttgttctctgcgagaac

SEQ ID NO: 1468 - DNA, 20 bp, Artificial sequence
  Synthetic oligonucleotide
gccacgcagatcatgatgac

SEQ ID NO: 1469 - DNA, 20 bp, Artificial sequence
  Synthetic oligonucleotide
ctcaaccgcctcttctgcaa

SEQ ID NO: 1470 - DNA, 20 bp, Artificial sequence
  Synthetic oligonucleotide
cacacggctcctgtgagtca

SEQ ID NO: 1471 - DNA, 20 bp, Artificial sequence
  Synthetic oligonucleotide
cccaggctcattcccgccat

SEQ ID NO: 1472 - DNA, 20 bp, Artificial sequence
  Synthetic oligonucleotide
cgaggcagaattctccattc

SEQ ID NO: 1473 - DNA, 20 bp, Artificial sequence
  Synthetic oligonucleotide
tctacaggctccttgcatgc

SEQ ID NO: 1474 - DNA, 20 bp, Artificial sequence
  Synthetic oligonucleotide
gggaaccccaccacatcact

SEQ ID NO: 1475 - DNA, 20 bp, Artificial sequence
  Synthetic oligonucleotide
gctcaactccagagaaccaa

SEQ ID NO: 1476 - DNA, 20 bp, Artificial sequence
  Synthetic oligonucleotide
accagctcatttcactccgg

SEQ ID NO: 1477 - DNA, 20 bp, Artificial sequence
  Synthetic oligonucleotide
caacaggttctacctaccaa

SEQ ID NO: 1478 - DNA, 20 bp, Artificial sequence
  Synthetic oligonucleotide
cgactctgaacctctgcctc

SEQ ID NO: 1479 - DNA, 20 bp, Artificial sequence
  Synthetic oligonucleotide
agggcagaattaccttgcaa

SEQ ID NO: 1480 - DNA, 20 bp, Artificial sequence
  Synthetic oligonucleotide
tccacactccagaagaacaa

SEQ ID NO: 1481 - DNA, 20 bp, Artificial sequence
  Synthetic oligonucleotide
tctcatggctctcattggcc

SEQ ID NO: 1482 - DNA, 20 bp, Artificial sequence
  Synthetic oligonucleotide
cagttatgactcaatgagcc

SEQ ID NO: 1483 - DNA, 20 bp, Artificial sequence
  Synthetic oligonucleotide
tcctggttccaccatcaaga

SEQ ID NO: 1484 - DNA, 20 bp, Artificial sequence
  Synthetic oligonucleotide
gcaaccctgcccattgccag

SEQ ID NO: 1485 - DNA, 20 bp, Artificial sequence
  Synthetic oligonucleotide
gggctggacaccagccgacc

SEQ ID NO: 1486 - DNA, 20 bp, Artificial sequence
  Synthetic oligonucleotide
caccaggccaaccatccccc

SEQ ID NO: 1487 - DNA, 20 bp, Artificial sequence
  Synthetic oligonucleotide
cttgccatcccgaaattcca

SEQ ID NO: 1488 - DNA, 20 bp, Artificial sequence
  Synthetic oligonucleotide
attttaaccctctttgccgc

SEQ ID NO: 1489 - DNA, 20 bp, Artificial sequence
  Synthetic oligonucleotide
tgcacatcccgatttggccc

SEQ ID NO: 1490 - DNA, 20 bp, Artificial sequence
  Synthetic oligonucleotide
gtgatttgcatccagaattc

SEQ ID NO: 1491 - DNA, 20 bp, Artificial sequence
  Synthetic oligonucleotide
tggtccctgcccatagaggt

SEQ ID NO: 1492 - DNA, 20 bp, Artificial sequence
  Synthetic oligonucleotide
ctccctccaatagaacctca

SEQ ID NO: 1493 - DNA, 20 bp, Artificial sequence
  Synthetic oligonucleotide
cactggctgttaaatttgct

SEQ ID NO: 1494 - DNA, 20 bp, Artificial sequence
  Synthetic oligonucleotide
gtccacttcctccaccgggc

SEQ ID NO: 1495 - DNA, 20 bp, Artificial sequence
  Synthetic oligonucleotide
gtctctgtatatgcctggcc

SEQ ID NO: 1496 - DNA, 20 bp, Artificial sequence
  Synthetic oligonucleotide
gcacagctcccatggatgaa

SEQ ID NO: 1497 - DNA, 20 bp, Artificial sequence
  Synthetic oligonucleotide
ggtcccaggcctctgagcgc

SEQ ID NO: 1498 - DNA, 20 bp, Artificial sequence
  Synthetic oligonucleotide
ggtgccgaaccttaaggacc

SEQ ID NO: 1499 - DNA, 20 bp, Artificial sequence
  Synthetic oligonucleotide
gcaggtccaccctcccccgc

SEQ ID NO: 1500 - DNA, 20 bp, Artificial sequence
  Synthetic oligonucleotide
taaccgttcccttccatgtc

SEQ ID NO: 1501 - DNA, 20 bp, Artificial sequence
  Synthetic oligonucleotide
acctcactgctcacaaggcc

SEQ ID NO: 1502 - DNA, 20 bp, Artificial sequence
  Synthetic oligonucleotide
gccttcgccatcgccaggct

SEQ ID NO: 1503 - DNA, 20 bp, Artificial sequence
  Synthetic oligonucleotide
gggctcgccacccctcatgc

SEQ ID NO: 1504 - DNA, 20 bp, Artificial sequence
  Synthetic oligonucleotide
gctaatgaaacagcctggtc

SEQ ID NO: 1505 - DNA, 20 bp, Artificial sequence
  Synthetic oligonucleotide
cttggtttccaatcatcatt

SEQ ID NO: 1506 - DNA, 20 bp, Artificial sequence
  Synthetic oligonucleotide
ttggctcacccagatcatcc

SEQ ID NO: 1507 - DNA, 20 bp, Artificial sequence
  Synthetic oligonucleotide
aaccatggtcctcctgggcc

SEQ ID NO: 1508 - DNA, 20 bp, Artificial sequence
  Synthetic oligonucleotide
ctcttggttcacacaaccaa

SEQ ID NO: 1509 - DNA, 20 bp, Artificial sequence
  Synthetic oligonucleotide
gggctgccaccctcactgaa

SEQ ID NO: 1510 - DNA, 20 bp, Artificial sequence
  Synthetic oligonucleotide
gcccaagcacttcacaccct

SEQ ID NO: 1511 - DNA, 20 bp, Artificial sequence
  Synthetic oligonucleotide
gatggtccacactaaatggt

SEQ ID NO: 1512 - DNA, 20 bp, Artificial sequence
  Synthetic oligonucleotide
cactatgccactaaggacac

SEQ ID NO: 1513 - DNA, 20 bp, Artificial sequence
  Synthetic oligonucleotide
aggtaagcatttaaaccttg

SEQ ID NO: 1514 - DNA, 20 bp, Artificial sequence
  Synthetic oligonucleotide
atggaagcccccttcaaccc

SEQ ID NO: 1515 - DNA, 20 bp, Artificial sequence
  Synthetic oligonucleotide
tctcagggtctccctggata

SEQ ID NO: 1516 - DNA, 20 bp, Artificial sequence
  Synthetic oligonucleotide
agctcaggccacccaagact

SEQ ID NO: 1517 - DNA, 20 bp, Artificial sequence
  Synthetic oligonucleotide
tgcggaatcccctcctgcac

SEQ ID NO: 1518 - DNA, 20 bp, Artificial sequence
  Synthetic oligonucleotide
tctgttcacctcacatgcat

SEQ ID NO: 1519 - DNA, 20 bp, Artificial sequence
  Synthetic oligonucleotide
gggatggcttctaatggcag

SEQ ID NO: 1520 - DNA, 20 bp, Artificial sequence
  Synthetic oligonucleotide
cagggtcatcctcgaagcca

SEQ ID NO: 1521 - DNA, 20 bp, Artificial sequence
  Synthetic oligonucleotide
ccaccaagaaacatcgcaga

SEQ ID NO: 1522 - DNA, 20 bp, Artificial sequence
  Synthetic oligonucleotide
gctccgcttgaatctaaaca

SEQ ID NO: 1523 - DNA, 20 bp, Artificial sequence
  Synthetic oligonucleotide
gtctcccgccctgcctggtc

SEQ ID NO: 1524 - DNA, 20 bp, Artificial sequence
  Synthetic oligonucleotide
cctgttggtccttaactgaa

SEQ ID NO: 1525 - DNA, 20 bp, Artificial sequence
  Synthetic oligonucleotide
accagcacagcaaaggcaca

SEQ ID NO: 1526 - DNA, 20 bp, Artificial sequence
  Synthetic oligonucleotide
ctttcactctccatcgggtt

SEQ ID NO: 1527 - DNA, 20 bp, Artificial sequence
  Synthetic oligonucleotide
gctggcccaactctagctga

SEQ ID NO: 1528 - DNA, 20 bp, Artificial sequence
  Synthetic oligonucleotide
cacccttcccaaactcagct

SEQ ID NO: 1529 - DNA, 20 bp, Artificial sequence
  Synthetic oligonucleotide
cacagttcaatcccgaacac

SEQ ID NO: 1530 - DNA, 20 bp, Artificial sequence
  Synthetic oligonucleotide
gccttgggctcttacccaca

SEQ ID NO: 1531 - DNA, 20 bp, Artificial sequence
  Synthetic oligonucleotide
gctcaaaccatcaggaccca

SEQ ID NO: 1532 - DNA, 20 bp, Artificial sequence
  Synthetic oligonucleotide
tcatttcactccggcaggca

SEQ ID NO: 1533 - DNA, 20 bp, Artificial sequence
  Synthetic oligonucleotide
ctcgctgtcaacacacgaac

SEQ ID NO: 1534 - DNA, 20 bp, Artificial sequence
  Synthetic oligonucleotide
tctgaagccccaaactagct

SEQ ID NO: 1535 - DNA, 20 bp, Artificial sequence
  Synthetic oligonucleotide
gcatcagcccagagcacccc

SEQ ID NO: 1536 - DNA, 20 bp, Artificial sequence
  Synthetic oligonucleotide
tgagctccacctcatgccga

SEQ ID NO: 1537 - DNA, 20 bp, Artificial sequence
  Synthetic oligonucleotide
ggtcgggctatctaacccac

SEQ ID NO: 1538 - DNA, 20 bp, Artificial sequence
  Synthetic oligonucleotide
gggtttgtcacacccttcac

SEQ ID NO: 1539 - DNA, 20 bp, Artificial sequence
  Synthetic oligonucleotide
gcatgggacaatctccccca

SEQ ID NO: 1540 - DNA, 20 bp, Artificial sequence
  Synthetic oligonucleotide
aggcagcactcactctacca

SEQ ID NO: 1541 - DNA, 20 bp, Artificial sequence
  Synthetic oligonucleotide
tagagtcccagcacctgcct

SEQ ID NO: 1542 - DNA, 20 bp, Artificial sequence
  Synthetic oligonucleotide
tacagcattacaatttgatc

SEQ ID NO: 1543 - DNA, 20 bp, Artificial sequence
  Synthetic oligonucleotide
cccctctcacatgcccggct

SEQ ID NO: 1544 - DNA, 20 bp, Artificial sequence
  Synthetic oligonucleotide
atggatggtccaccccagac

SEQ ID NO: 1545 - DNA, 20 bp, Artificial sequence
  Synthetic oligonucleotide
aggaaaactccaatgctgcc

SEQ ID NO: 1546 - DNA, 20 bp, Artificial sequence
  Synthetic oligonucleotide
tctgtccccaagctctgccg

SEQ ID NO: 1547 - DNA, 20 bp, Artificial sequence
  Synthetic oligonucleotide
gagctggccctccccccgca

SEQ ID NO: 1548 - DNA, 20 bp, Artificial sequence
  Synthetic oligonucleotide
ggcctggtttccctatttac

SEQ ID NO: 1549 - DNA, 20 bp, Artificial sequence
  Synthetic oligonucleotide
cctgatgaaacttcagccct

SEQ ID NO: 1550 - DNA, 20 bp, Artificial sequence
  Synthetic oligonucleotide
ccagaagaacaaacctacca

SEQ ID NO: 1551 - DNA, 20 bp, Artificial sequence
  Synthetic oligonucleotide
caaagcctcttccatttgac

SEQ ID NO: 1552 - DNA, 20 bp, Artificial sequence
  Synthetic oligonucleotide
tacaaaccagtaaggaacca

SEQ ID NO: 1553 - DNA, 20 bp, Artificial sequence
  Synthetic oligonucleotide
tgagctcctcagcatgggcc

SEQ ID NO: 1554 - DNA, 20 bp, Artificial sequence
  Synthetic oligonucleotide
ctggagacaccatcttcgga

SEQ ID NO: 1555 - DNA, 20 bp, Artificial sequence
  Synthetic oligonucleotide
tcagccttcactcacacagt

SEQ ID NO: 1556 - DNA, 20 bp, Artificial sequence
  Synthetic oligonucleotide
agtgggcatccccatactgc

SEQ ID NO: 1557 - DNA, 20 bp, Artificial sequence
  Synthetic oligonucleotide
ggctcagtgcccttcaggga

SEQ ID NO: 1558 - DNA, 20 bp, Artificial sequence
  Synthetic oligonucleotide
gctgctcaccttttctagtt

SEQ ID NO: 1559 - DNA, 20 bp, Artificial sequence
  Synthetic oligonucleotide
aggctactccccccaggcct

SEQ ID NO: 1560 - DNA, 20 bp, Artificial sequence
  Synthetic oligonucleotide
gggaagctccacaccagctc

SEQ ID NO: 1561 - DNA, 20 bp, Artificial sequence
  Synthetic oligonucleotide
agttcctccccagacaccgt

SEQ ID NO: 1562 - DNA, 20 bp, Artificial sequence
  Synthetic oligonucleotide
catgtagtcctcctcggcgc

SEQ ID NO: 1563 - DNA, 20 bp, Artificial sequence
  Synthetic oligonucleotide
gcaaagctccctctggagga

SEQ ID NO: 1564 - DNA, 20 bp, Artificial sequence
  Synthetic oligonucleotide
cacgataatttcccatcttc

SEQ ID NO: 1565 - DNA, 20 bp, Artificial sequence
  Synthetic oligonucleotide
tgaccctgccttcactgacc

SEQ ID NO: 1566 - DNA, 20 bp, Artificial sequence
  Synthetic oligonucleotide
ggcatcagaccccaccccaa

SEQ ID NO: 1567 - DNA, 20 bp, Artificial sequence
  Synthetic oligonucleotide
aaagcaggtccccctgcacc

SEQ ID NO: 1568 - DNA, 20 bp, Artificial sequence
  Synthetic oligonucleotide
ctgatgaaacttcagccctc

SEQ ID NO: 1569 - DNA, 20 bp, Artificial sequence
  Synthetic oligonucleotide
cgagaaggccctcttcttcc

SEQ ID NO: 1570 - DNA, 20 bp, Artificial sequence
  Synthetic oligonucleotide
ggctcgccacccctcatgca

SEQ ID NO: 1571 - DNA, 20 bp, Artificial sequence
  Synthetic oligonucleotide
cactaaggacacattcaggc

SEQ ID NO: 1572 - DNA, 20 bp, Artificial sequence
  Synthetic oligonucleotide
actggctgttaaatttgcta

SEQ ID NO: 1573 - DNA, 20 bp, Artificial sequence
  Synthetic oligonucleotide
aaccgttcccttccatgtca

SEQ ID NO: 1574 - DNA, 20 bp, Artificial sequence
  Synthetic oligonucleotide
ggctactccccccaggcctc

SEQ ID NO: 1575 - DNA, 20 bp, Artificial sequence
  Synthetic oligonucleotide
ccttcactcacacagtggcc

SEQ ID NO: 1576 - DNA, 20 bp, Artificial sequence
  Synthetic oligonucleotide
ggcatctgtcccacatggac

SEQ ID NO: 1577 - DNA, 20 bp, Artificial sequence
  Synthetic oligonucleotide
ggtacggcctcatccaggtc

SEQ ID NO: 1578 - DNA, 20 bp, Artificial sequence
  Synthetic oligonucleotide
gtttgtcacacccttcactt

SEQ ID NO: 1579 - DNA, 20 bp, Artificial sequence
  Synthetic oligonucleotide
tccaatagaacctcactgta

SEQ ID NO: 1580 - DNA, 20 bp, Artificial sequence
  Synthetic oligonucleotide
gcggaatcccctcctgcaca

SEQ ID NO: 1581 - DNA, 20 bp, Artificial sequence
  Synthetic oligonucleotide
ggagtggagactcatcccac

SEQ ID NO: 1582 - DNA, 20 bp, Artificial sequence
  Synthetic oligonucleotide
aggtccaccctcccccgcaa

SEQ ID NO: 1583 - DNA, 20 bp, Artificial sequence
  Synthetic oligonucleotide
agcatttaaaccttggtgga

SEQ ID NO: 1584 - DNA, 20 bp, Artificial sequence
  Synthetic oligonucleotide
cttggttcacacaaccaaat

SEQ ID NO: 1585 - DNA, 20 bp, Artificial sequence
  Synthetic oligonucleotide
gtcgggctatctaacccaca

SEQ ID NO: 1586 - DNA, 20 bp, Artificial sequence
  Synthetic oligonucleotide
ctaatgaaacagcctggtca

SEQ ID NO: 1587 - DNA, 20 bp, Artificial sequence
  Synthetic oligonucleotide
ctgttggtccttaactgaaa

SEQ ID NO: 1588 - DNA, 20 bp, Artificial sequence
  Synthetic oligonucleotide
ccaagcacttcacaccctga

SEQ ID NO: 1589 - DNA, 20 bp, Artificial sequence
  Synthetic oligonucleotide
aaagcctcttccatttgacc

SEQ ID NO: 1590 - DNA, 20 bp, Artificial sequence
  Synthetic oligonucleotide
ccggcaggcacagactggcc

SEQ ID NO: 1591 - DNA, 20 bp, Artificial sequence
  Synthetic oligonucleotide
caccaagaaacatcgcagac

SEQ ID NO: 1592 - DNA, 20 bp, Artificial sequence
  Synthetic oligonucleotide
tggaagcccccttcaaccct

SEQ ID NO: 1593 - DNA, 20 bp, Artificial sequence
  Synthetic oligonucleotide
gcacatgtccccctaaacgg

SEQ ID NO: 1594 - DNA, 20 bp, Artificial sequence
  Synthetic oligonucleotide
acagcattacaatttgatca

SEQ ID NO: 1595 - DNA, 20 bp, Artificial sequence
  Synthetic oligonucleotide
agcaaaggcacaacaagatc

SEQ ID NO: 1596 - DNA, 20 bp, Artificial sequence
  Synthetic oligonucleotide
ctgaagccccaaactagctg

SEQ ID NO: 1597 - DNA, 20 bp, Artificial sequence
  Synthetic oligonucleotide
ccctctcacatgcccggctt

SEQ ID NO: 1598 - DNA, 20 bp, Artificial sequence
  Synthetic oligonucleotide
ccttcccaaactcagctcca

SEQ ID NO: 1599 - DNA, 20 bp, Artificial sequence
  Synthetic oligonucleotide
tcgctgtcaacacacgaaca

SEQ ID NO: 1600 - DNA, 20 bp, Artificial sequence
  Synthetic oligonucleotide
cagaagaacaaacctaccaa

SEQ ID NO: 1601 - DNA, 20 bp, Artificial sequence
  Synthetic oligonucleotide
ctgagaggactcagggactt

SEQ ID NO: 1602 - DNA, 20 bp, Artificial sequence
  Synthetic oligonucleotide
ttgccatcccgaaattccaa

SEQ ID NO: 1603 - DNA, 20 bp, Artificial sequence
  Synthetic oligonucleotide
agctggccctccccccgcat

SEQ ID NO: 1604 - DNA, 20 bp, Artificial sequence
  Synthetic oligonucleotide
ctttgaggccccttgacctc

SEQ ID NO: 1605 - DNA, 20 bp, Artificial sequence
  Synthetic oligonucleotide
gagcggctatcccgctgccc

SEQ ID NO: 1606 - DNA, 20 bp, Artificial sequence
  Synthetic oligonucleotide
aggctgtccccttgtctcca

SEQ ID NO: 1607 - DNA, 20 bp, Artificial sequence
  Synthetic oligonucleotide
ggcttgtcaccccaccgggc

SEQ ID NO: 1608 - DNA, 20 bp, Artificial sequence
  Synthetic oligonucleotide
ggatggtccaccccagacga

SEQ ID NO: 1609 - DNA, 20 bp, Artificial sequence
  Synthetic oligonucleotide
gggcccaccatagccctgca

SEQ ID NO: 1610 - DNA, 20 bp, Artificial sequence
  Synthetic oligonucleotide
gtgccgaaccttaaggaccc

SEQ ID NO: 1611 - DNA, 20 bp, Artificial sequence
  Synthetic oligonucleotide
gcctggtttccctatttact

SEQ ID NO: 1612 - DNA, 20 bp, Artificial sequence
  Synthetic oligonucleotide
atccagaattccagccgtac

SEQ ID NO: 1613 - DNA, 20 bp, Artificial sequence
  Synthetic oligonucleotide
gtgggcatccccatactgcc

SEQ ID NO: 1614 - DNA, 20 bp, Artificial sequence
  Synthetic oligonucleotide
tggccagctcctcttgtctt

SEQ ID NO: 1615 - DNA, 20 bp, Artificial sequence
  Synthetic oligonucleotide
tggagacaccatcttcggaa

SEQ ID NO: 1616 - DNA, 20 bp, Artificial sequence
  Synthetic oligonucleotide
cgcttgagtcataaagacgc

SEQ ID NO: 1617 - DNA, 20 bp, Artificial sequence
  Synthetic oligonucleotide
caggcaccccactcactcga

SEQ ID NO: 1618 - DNA, 20 bp, Artificial sequence
  Synthetic oligonucleotide
ggcagcactcactctaccac

SEQ ID NO: 1619 - DNA, 20 bp, Artificial sequence
  Synthetic oligonucleotide
cttcgactcaccgtggctcc

SEQ ID NO: 1620 - DNA, 20 bp, Artificial sequence
  Synthetic oligonucleotide
agctcctcagcatgggcccc

SEQ ID NO: 1621 - DNA, 20 bp, Artificial sequence
  Synthetic oligonucleotide
ccttgggctcttacccacat

SEQ ID NO: 1622 - DNA, 20 bp, Artificial sequence
  Synthetic oligonucleotide
ttttaaccctctttgccgcc

SEQ ID NO: 1623 - DNA, 20 bp, Artificial sequence
  Synthetic oligonucleotide
catgggacaatctcccccaa

SEQ ID NO: 1624 - DNA, 20 bp, Artificial sequence
  Synthetic oligonucleotide
catgcatgccttcatctaca

SEQ ID NO: 1625 - DNA, 20 bp, Artificial sequence
  Synthetic oligonucleotide
accaggccaaccatccccca

SEQ ID NO: 1626 - DNA, 20 bp, Artificial sequence
  Synthetic oligonucleotide
gaggaagctccaatccaggt

SEQ ID NO: 1627 - DNA, 20 bp, Artificial sequence
  Synthetic oligonucleotide
gaaccagcagcaaaggacgc

SEQ ID NO: 1628 - DNA, 20 bp, Artificial sequence
  Synthetic oligonucleotide
ttggtttccaatcatcattt

SEQ ID NO: 1629 - DNA, 20 bp, Artificial sequence
  Synthetic oligonucleotide
caatcccgaacaccatgtca

SEQ ID NO: 1630 - DNA, 20 bp, Artificial sequence
  Synthetic oligonucleotide
gcccaactctagctgatgcc

SEQ ID NO: 1631 - DNA, 20 bp, Artificial sequence
  Synthetic oligonucleotide
gcagctccccagccccagaa

SEQ ID NO: 1632 - DNA, 20 bp, Artificial sequence
  Synthetic oligonucleotide
atggtccacactaaatggtc

SEQ ID NO: 1633 - DNA, 20 bp, Artificial sequence
  Synthetic oligonucleotide
gccggagccacctcctgcct

SEQ ID NO: 1634 - DNA, 20 bp, Artificial sequence
  Synthetic oligonucleotide
gcagctcatccctccgagaa

SEQ ID NO: 1635 - DNA, 20 bp, Artificial sequence
  Synthetic oligonucleotide
ccacaggccaccttgaggtg

SEQ ID NO: 1636 - DNA, 20 bp, Artificial sequence
  Synthetic oligonucleotide
gccccccaccttccagatct

SEQ ID NO: 1637 - DNA, 20 bp, Artificial sequence
  Synthetic oligonucleotide
ccacggtgtcacaatcctgc

SEQ ID NO: 1638 - DNA, 20 bp, Artificial sequence
  Synthetic oligonucleotide
gccgagctcttctctgtcca

SEQ ID NO: 1639 - DNA, 20 bp, Artificial sequence
  Synthetic oligonucleotide
gggctatctaacccacagcc

SEQ ID NO: 1640 - DNA, 20 bp, Artificial sequence
  Synthetic oligonucleotide
agcactcactctaccacgga

SEQ ID NO: 1641 - DNA, 20 bp, Artificial sequence
  Synthetic oligonucleotide
gcacttcacaccctgaggca

SEQ ID NO: 1642 - DNA, 20 bp, Artificial sequence
  Synthetic oligonucleotide
tcccgaaattccaaatcctc

SEQ ID NO: 1643 - DNA, 20 bp, Artificial sequence
  Synthetic oligonucleotide
aggcaccccactcactcgat

SEQ ID NO: 1644 - DNA, 20 bp, Artificial sequence
  Synthetic oligonucleotide
gcttgagtcataaagacgca

SEQ ID NO: 1645 - DNA, 20 bp, Artificial sequence
  Synthetic oligonucleotide
ccatcaggccatctttgaca

SEQ ID NO: 1646 - DNA, 20 bp, Artificial sequence
  Synthetic oligonucleotide
gatctgagcccctcggtcca

SEQ ID NO: 1647 - DNA, 20 bp, Artificial sequence
  Synthetic oligonucleotide
gcatggttccccgactcctc

SEQ ID NO: 1648 - DNA, 20 bp, Artificial sequence
  Synthetic oligonucleotide
agtggagactcatcccaccc

SEQ ID NO: 1649 - DNA, 20 bp, Artificial sequence
  Synthetic oligonucleotide
gacttagccccatcagggcc

SEQ ID NO: 1650 - DNA, 20 bp, Artificial sequence
  Synthetic oligonucleotide
cctggtttccctatttactg

SEQ ID NO: 1651 - DNA, 20 bp, Artificial sequence
  Synthetic oligonucleotide
gcccatctccccatgcttgt

SEQ ID NO: 1652 - DNA, 20 bp, Artificial sequence
  Synthetic oligonucleotide
ccccttgacctcctcctggc

SEQ ID NO: 1653 - DNA, 20 bp, Artificial sequence
  Synthetic oligonucleotide
cacatgtccccctaaacggc

SEQ ID NO: 1654 - DNA, 20 bp, Artificial sequence
  Synthetic oligonucleotide
tctccgcttcctgtcagggc

SEQ ID NO: 1655 - DNA, 20 bp, Artificial sequence
  Synthetic oligonucleotide
cggaaggacattcagagaaa

SEQ ID NO: 1656 - DNA, 20 bp, Artificial sequence
  Synthetic oligonucleotide
ccgttcccttccatgtcaca

SEQ ID NO: 1657 - DNA, 20 bp, Artificial sequence
  Synthetic oligonucleotide
gtgaaattccagaacaactt

SEQ ID NO: 1658 - DNA, 20 bp, Artificial sequence
  Synthetic oligonucleotide
ggatgcggcccactccccac

SEQ ID NO: 1659 - DNA, 20 bp, Artificial sequence
  Synthetic oligonucleotide
gctcttctctgtccaaggcc

SEQ ID NO: 1660 - DNA, 20 bp, Artificial sequence
  Synthetic oligonucleotide
ggcacaacaagatccaggca

SEQ ID NO: 1661 - DNA, 20 bp, Artificial sequence
  Synthetic oligonucleotide
ctcgccacccctcatgcata

SEQ ID NO: 1662 - DNA, 20 bp, Artificial sequence
  Synthetic oligonucleotide
gaagaacaaacctaccaagt

SEQ ID NO: 1663 - DNA, 20 bp, Artificial sequence
  Synthetic oligonucleotide
ttgccggcccttctgtggat

SEQ ID NO: 1664 - DNA, 20 bp, Artificial sequence
  Synthetic oligonucleotide
cagctcatccctccgagaac

SEQ ID NO: 1665 - DNA, 20 bp, Artificial sequence
  Synthetic oligonucleotide
gtcaacacacgaacagaacc

SEQ ID NO: 1666 - DNA, 20 bp, Artificial sequence
  Synthetic oligonucleotide
actcagggacttgccaagca

SEQ ID NO: 1667 - DNA, 20 bp, Artificial sequence
  Synthetic oligonucleotide
tctttgccgccctcttttaa

SEQ ID NO: 1668 - DNA, 20 bp, Artificial sequence
  Synthetic oligonucleotide
cctggttttcccccacggaa

SEQ ID NO: 1669 - DNA, 20 bp, Artificial sequence
  Synthetic oligonucleotide
tttgtcacacccttcacttt

SEQ ID NO: 1670 - DNA, 20 bp, Artificial sequence
  Synthetic oligonucleotide
ggaagcccccttcaaccctc

SEQ ID NO: 1671 - DNA, 20 bp, Artificial sequence
  Synthetic oligonucleotide
gcatctgtcccacatggacc

SEQ ID NO: 1672 - DNA, 20 bp, Artificial sequence
  Synthetic oligonucleotide
gctagggatcccaatgaaat

SEQ ID NO: 1673 - DNA, 20 bp, Artificial sequence
  Synthetic oligonucleotide
aagcaggtccccctgcacct

SEQ ID NO: 1674 - DNA, 20 bp, Artificial sequence
  Synthetic oligonucleotide
cgccgcccgggatctcgcct

SEQ ID NO: 1675 - DNA, 20 bp, Artificial sequence
  Synthetic oligonucleotide
tggtccacactaaatggtcc

SEQ ID NO: 1676 - DNA, 20 bp, Artificial sequence
  Synthetic oligonucleotide
caggagggtcctccaagcgg

SEQ ID NO: 1677 - DNA, 20 bp, Artificial sequence
  Synthetic oligonucleotide
ggacaagctccctcattgaa

SEQ ID NO: 1678 - DNA, 20 bp, Artificial sequence
  Synthetic oligonucleotide
cttgtcaccccaccgggcat

SEQ ID NO: 1679 - DNA, 20 bp, Artificial sequence
  Synthetic oligonucleotide
ctggctgttaaatttgctac

SEQ ID NO: 1680 - DNA, 20 bp, Artificial sequence
  Synthetic oligonucleotide
gacctggacacaccaccctc

SEQ ID NO: 1681 - DNA, 20 bp, Artificial sequence
  Synthetic oligonucleotide
gaggagggcacttatgcaat

SEQ ID NO: 1682 - DNA, 20 bp, Artificial sequence
  Synthetic oligonucleotide
gcttcaggcccactgccaac

SEQ ID NO: 1683 - DNA, 20 bp, Artificial sequence
  Synthetic oligonucleotide
gtcttttctttcaactgatc

SEQ ID NO: 1684 - DNA, 20 bp, Artificial sequence
  Synthetic oligonucleotide
ctggccctccccccgcatga

SEQ ID NO: 1685 - DNA, 20 bp, Artificial sequence
  Synthetic oligonucleotide
ggtttccaatcatcattttc

SEQ ID NO: 1686 - DNA, 20 bp, Artificial sequence
  Synthetic oligonucleotide
cttcactcacacagtggccg

SEQ ID NO: 1687 - DNA, 20 bp, Artificial sequence
  Synthetic oligonucleotide
ccgtgtgcccttaccgtagc

SEQ ID NO: 1688 - DNA, 20 bp, Artificial sequence
  Synthetic oligonucleotide
aagcctcttccatttgacct

SEQ ID NO: 1689 - DNA, 20 bp, Artificial sequence
  Synthetic oligonucleotide
gcttccccaccaccagtgca

SEQ ID NO: 1690 - DNA, 20 bp, Artificial sequence
  Synthetic oligonucleotide
cttgggctcttacccacata

SEQ ID NO: 1691 - DNA, 20 bp, Artificial sequence
  Synthetic oligonucleotide
ggcatccccatactgccccc

SEQ ID NO: 1692 - DNA, 20 bp, Artificial sequence
  Synthetic oligonucleotide
aaggcggccactcccttccc

SEQ ID NO: 1693 - DNA, 20 bp, Artificial sequence
  Synthetic oligonucleotide
acaatttgatcaaccacagc

SEQ ID NO: 1694 - DNA, 20 bp, Artificial sequence
  Synthetic oligonucleotide
caatagaacctcactgtata

SEQ ID NO: 1695 - DNA, 20 bp, Artificial sequence
  Synthetic oligonucleotide
agaaggccctcttcttccgc

SEQ ID NO: 1696 - DNA, 20 bp, Artificial sequence
  Synthetic oligonucleotide
gacaatctcccccaaagcgg

SEQ ID NO: 1697 - DNA, 20 bp, Artificial sequence
  Synthetic oligonucleotide
cacggtgtcacaatcctgca

SEQ ID NO: 1698 - DNA, 20 bp, Artificial sequence
  Synthetic oligonucleotide
taaggacacattcaggctcc

SEQ ID NO: 1699 - DNA, 20 bp, Artificial sequence
  Synthetic oligonucleotide
atcgcagacccacctgccac

SEQ ID NO: 1700 - DNA, 20 bp, Artificial sequence
  Synthetic oligonucleotide
acgataatttcccatcttca

SEQ ID NO: 1701 - DNA, 20 bp, Artificial sequence
  Synthetic oligonucleotide
ccaggatcccagcataagac

SEQ ID NO: 1702 - DNA, 20 bp, Artificial sequence
  Synthetic oligonucleotide
ggtggagtaaaaacaatgat

SEQ ID NO: 1703 - DNA, 20 bp, Artificial sequence
  Synthetic oligonucleotide
ggtacagcctgaaactggcc

SEQ ID NO: 1704 - DNA, 20 bp, Artificial sequence
  Synthetic oligonucleotide
cggagccacctcctgcctga

SEQ ID NO: 1705 - DNA, 20 bp, Artificial sequence
  Synthetic oligonucleotide
gatggtccaccccagacgat

SEQ ID NO: 1706 - DNA, 20 bp, Artificial sequence
  Synthetic oligonucleotide
agctaagtcccctccctgtc

SEQ ID NO: 1707 - DNA, 20 bp, Artificial sequence
  Synthetic oligonucleotide
ccaggccaaccatcccccac

SEQ ID NO: 1708 - DNA, 20 bp, Artificial sequence
  Synthetic oligonucleotide
gttcacacaaccaaatgtta

SEQ ID NO: 1709 - DNA, 20 bp, Artificial sequence
  Synthetic oligonucleotide
tgcatgccttcatctacacc

SEQ ID NO: 1710 - DNA, 20 bp, Artificial sequence
  Synthetic oligonucleotide
gtctcagattcacaatcccg

SEQ ID NO: 1711 - DNA, 20 bp, Artificial sequence
  Synthetic oligonucleotide
cggcaggcacagactggccc

SEQ ID NO: 1712 - DNA, 20 bp, Artificial sequence
  Synthetic oligonucleotide
gctcagggcctcctgatgca

SEQ ID NO: 1713 - DNA, 20 bp, Artificial sequence
  Synthetic oligonucleotide
atgcccggcttccccgggcc

SEQ ID NO: 1714 - DNA, 20 bp, Artificial sequence
  Synthetic oligonucleotide
gaggaccccctttcttgctg

SEQ ID NO: 1715 - DNA, 20 bp, Artificial sequence
  Synthetic oligonucleotide
caccgtcaccctcccgggca

SEQ ID NO: 1716 - DNA, 20 bp, Artificial sequence
  Synthetic oligonucleotide
catggttccccgactcctcc

SEQ ID NO: 1717 - DNA, 20 bp, Artificial sequence
  Synthetic oligonucleotide
ttccatgtcacagacgcggc

SEQ ID NO: 1718 - DNA, 20 bp, Artificial sequence
  Synthetic oligonucleotide
aggcggccactcccttccca

SEQ ID NO: 1719 - DNA, 20 bp, Artificial sequence
  Synthetic oligonucleotide
gccaacccctccacttccga

SEQ ID NO: 1720 - DNA, 20 bp, Artificial sequence
  Synthetic oligonucleotide
atggtgagtagagtgtgcca

SEQ ID NO: 1721 - DNA, 20 bp, Artificial sequence
  Synthetic oligonucleotide
gcggctgatcccctcctcca

SEQ ID NO: 1722 - DNA, 20 bp, Artificial sequence
  Synthetic oligonucleotide
gcatgccttcatctacacct

SEQ ID NO: 1723 - DNA, 20 bp, Artificial sequence
  Synthetic oligonucleotide
caggtgaacacagtcagctc

SEQ ID NO: 1724 - DNA, 20 bp, Artificial sequence
  Synthetic oligonucleotide
acttagccccatcagggcct

SEQ ID NO: 1725 - DNA, 20 bp, Artificial sequence
  Synthetic oligonucleotide
gcctccacctttcccactga

SEQ ID NO: 1726 - DNA, 20 bp, Artificial sequence
  Synthetic oligonucleotide
ctggtttccctatttactga

SEQ ID NO: 1727 - DNA, 20 bp, Artificial sequence
  Synthetic oligonucleotide
gtctcttgccctgacaggcc

SEQ ID NO: 1728 - DNA, 20 bp, Artificial sequence
  Synthetic oligonucleotide
tcacggaccctcctccatgc

SEQ ID NO: 1729 - DNA, 20 bp, Artificial sequence
  Synthetic oligonucleotide
agggatcccaatgaaataca

SEQ ID NO: 1730 - DNA, 20 bp, Artificial sequence
  Synthetic oligonucleotide
gggacaagcctcccacagac

SEQ ID NO: 1731 - DNA, 20 bp, Artificial sequence
  Synthetic oligonucleotide
caggatcccagcataagact

SEQ ID NO: 1732 - DNA, 20 bp, Artificial sequence
  Synthetic oligonucleotide
cccgaaattccaaatcctcc

SEQ ID NO: 1733 - DNA, 20 bp, Artificial sequence
  Synthetic oligonucleotide
gaggatttcccacgacatct

SEQ ID NO: 1734 - DNA, 20 bp, Artificial sequence
  Synthetic oligonucleotide
cgtctgctcctatcagtcgg

SEQ ID NO: 1735 - DNA, 20 bp, Artificial sequence
  Synthetic oligonucleotide
cggcgaattccccggagcct

SEQ ID NO: 1736 - DNA, 20 bp, Artificial sequence
  Synthetic oligonucleotide
tcgccacccctcatgcatac

SEQ ID NO: 1737 - DNA, 20 bp, Artificial sequence
  Synthetic oligonucleotide
caggccaaccatcccccacc

SEQ ID NO: 1738 - DNA, 20 bp, Artificial sequence
  Synthetic oligonucleotide
agcctcttccatttgaccta

SEQ ID NO: 1739 - DNA, 20 bp, Artificial sequence
  Synthetic oligonucleotide
tggagactcatcccacccca

SEQ ID NO: 1740 - DNA, 20 bp, Artificial sequence
  Synthetic oligonucleotide
gccctgtccccccattgggc

SEQ ID NO: 1741 - DNA, 20 bp, Artificial sequence
  Synthetic oligonucleotide
gggctaggaagaacctgcct

SEQ ID NO: 1742 - DNA, 20 bp, Artificial sequence
  Synthetic oligonucleotide
acactgtgatccaaaatgaa

SEQ ID NO: 1743 - DNA, 20 bp, Artificial sequence
  Synthetic oligonucleotide
gtttgtgaatcaccataacc

SEQ ID NO: 1744 - DNA, 20 bp, Artificial sequence
  Synthetic oligonucleotide
gtcacacccttcactttgtc

SEQ ID NO: 1745 - DNA, 20 bp, Artificial sequence
  Synthetic oligonucleotide
aacaaacctaccaagtcctc

SEQ ID NO: 1746 - DNA, 20 bp, Artificial sequence
  Synthetic oligonucleotide
catcaggccatctttgacac

SEQ ID NO: 1747 - DNA, 20 bp, Artificial sequence
  Synthetic oligonucleotide
aatggtccatcccagaaggt

SEQ ID NO: 1748 - DNA, 20 bp, Artificial sequence
  Synthetic oligonucleotide
caacagccttctctgagccg

SEQ ID NO: 1749 - DNA, 20 bp, Artificial sequence
  Synthetic oligonucleotide
cggtgtcacaatcctgcagc

SEQ ID NO: 1750 - DNA, 20 bp, Artificial sequence
  Synthetic oligonucleotide
ggcagggccacctcgcccct

SEQ ID NO: 1751 - DNA, 20 bp, Artificial sequence
  Synthetic oligonucleotide
tggacacaccaccctccacc

SEQ ID NO: 1752 - DNA, 20 bp, Artificial sequence
  Synthetic oligonucleotide
gagtcggtcaccagaaaggc

SEQ ID NO: 1753 - DNA, 20 bp, Artificial sequence
  Synthetic oligonucleotide
tgcccggcttccccgggccc

SEQ ID NO: 1754 - DNA, 20 bp, Artificial sequence
  Synthetic oligonucleotide
ttgggctcttacccacatac

SEQ ID NO: 1755 - DNA, 20 bp, Artificial sequence
  Synthetic oligonucleotide
gaaggccctcttcttccgct

SEQ ID NO: 1756 - DNA, 20 bp, Artificial sequence
  Synthetic oligonucleotide
cacttatgcaatcccaggct

SEQ ID NO: 1757 - DNA, 20 bp, Artificial sequence
  Synthetic oligonucleotide
gacaagctccctcattgaat

SEQ ID NO: 1758 - DNA, 20 bp, Artificial sequence
  Synthetic oligonucleotide
agctcatccctccgagaaca

SEQ ID NO: 1759 - DNA, 20 bp, Artificial sequence
  Synthetic oligonucleotide
ggcaccccactcactcgatc

SEQ ID NO: 1760 - DNA, 20 bp, Artificial sequence
  Synthetic oligonucleotide
gtacagcctgaaactggcca

SEQ ID NO: 1761 - DNA, 20 bp, Artificial sequence
  Synthetic oligonucleotide
gctaagtcccctccctgtcc

SEQ ID NO: 1762 - DNA, 20 bp, Artificial sequence
  Synthetic oligonucleotide
cggccacgccttacttgtcc

SEQ ID NO: 1763 - DNA, 20 bp, Artificial sequence
  Synthetic oligonucleotide
cactgtatacttcatttcca

SEQ ID NO: 1764 - DNA, 20 bp, Artificial sequence
  Synthetic oligonucleotide
gggctggtccccaaagacat

SEQ ID NO: 1765 - DNA, 20 bp, Artificial sequence
  Synthetic oligonucleotide
accgtcaccctcccgggcat

SEQ ID NO: 1766 - DNA, 20 bp, Artificial sequence
  Synthetic oligonucleotide
cacacgaacagaacctgcac

SEQ ID NO: 1767 - DNA, 20 bp, Artificial sequence
  Synthetic oligonucleotide
gacatgtgcccacaccaggc

SEQ ID NO: 1768 - DNA, 20 bp, Artificial sequence
  Synthetic oligonucleotide
ggctatctaacccacagccc

SEQ ID NO: 1769 - DNA, 20 bp, Artificial sequence
  Synthetic oligonucleotide
taatttcccatcttcaaggc

SEQ ID NO: 1770 - DNA, 20 bp, Artificial sequence
  Synthetic oligonucleotide
cagggacttgccaagcagtc

SEQ ID NO: 1771 - DNA, 20 bp, Artificial sequence
  Synthetic oligonucleotide
ctggttttcccccacggaac

SEQ ID NO: 1772 - DNA, 20 bp, Artificial sequence
  Synthetic oligonucleotide
ggacacttccactggaggat

SEQ ID NO: 1773 - DNA, 20 bp, Artificial sequence
  Synthetic oligonucleotide
cgtgtgcccttaccgtagcc

SEQ ID NO: 1774 - DNA, 20 bp, Artificial sequence
  Synthetic oligonucleotide
cccctcggtccagaatggcc

SEQ ID NO: 1775 - DNA, 20 bp, Artificial sequence
  Synthetic oligonucleotide
gttcagttccctgctgcctc

SEQ ID NO: 1776 - DNA, 20 bp, Artificial sequence
  Synthetic oligonucleotide
ccgccctcttttaaggactt

SEQ ID NO: 1777 - DNA, 20 bp, Artificial sequence
  Synthetic oligonucleotide
ttgctgagaagatcctctct

SEQ ID NO: 1778 - DNA, 20 bp, Artificial sequence
  Synthetic oligonucleotide
cccttgacctcctcctggca

SEQ ID NO: 1779 - DNA, 20 bp, Artificial sequence
  Synthetic oligonucleotide
ttcacacaaccaaatgttat

SEQ ID NO: 1780 - DNA, 20 bp, Artificial sequence
  Synthetic oligonucleotide
tcgcagacccacctgccacc

SEQ ID NO: 1781 - DNA, 20 bp, Artificial sequence
  Synthetic oligonucleotide
aggatgagtcctcatttgca

SEQ ID NO: 1782 - DNA, 20 bp, Artificial sequence
  Synthetic oligonucleotide
aatttgatcaaccacagcca

SEQ ID NO: 1783 - DNA, 20 bp, Artificial sequence
  Synthetic oligonucleotide
caactgatccactttcccct

SEQ ID NO: 1784 - DNA, 20 bp, Artificial sequence
  Synthetic oligonucleotide
catctgtcccacatggaccc

SEQ ID NO: 1785 - DNA, 20 bp, Artificial sequence
  Synthetic oligonucleotide
ttcaggcccactgccaaccc

SEQ ID NO: 1786 - DNA, 20 bp, Artificial sequence
  Synthetic oligonucleotide
caggaaacaagaaccacgac

SEQ ID NO: 1787 - DNA, 20 bp, Artificial sequence
  Synthetic oligonucleotide
ggagtgtcccagaaagtgca

SEQ ID NO: 1788 - DNA, 20 bp, Artificial sequence
  Synthetic oligonucleotide
cccaacccacatcacagtgt

SEQ ID NO: 1789 - DNA, 20 bp, Artificial sequence
  Synthetic oligonucleotide
gaagcccccttcaaccctcc

SEQ ID NO: 1790 - DNA, 20 bp, Artificial sequence
  Synthetic oligonucleotide
gctgtggtgactcactgcca

SEQ ID NO: 1791 - DNA, 20 bp, Artificial sequence
  Synthetic oligonucleotide
tccaccccagacgatccacc

SEQ ID NO: 1792 - DNA, 20 bp, Artificial sequence
  Synthetic oligonucleotide
ggttcattccagactggagc

SEQ ID NO: 1793 - DNA, 20 bp, Artificial sequence
  Synthetic oligonucleotide
ccctgtccccccattgggca

SEQ ID NO: 1794 - DNA, 20 bp, Artificial sequence
  Synthetic oligonucleotide
aggatttcccacgacatctt

SEQ ID NO: 1795 - DNA, 20 bp, Artificial sequence
  Synthetic oligonucleotide
ggttttcccccacggaaccc

SEQ ID NO: 1796 - DNA, 20 bp, Artificial sequence
  Synthetic oligonucleotide
tcagtcggctgccttagccc

SEQ ID NO: 1797 - DNA, 20 bp, Artificial sequence
  Synthetic oligonucleotide
aggccaaccatcccccacca

SEQ ID NO: 1798 - DNA, 20 bp, Artificial sequence
  Synthetic oligonucleotide
gccggctgtccaccttgacc

SEQ ID NO: 1799 - DNA, 20 bp, Artificial sequence
  Synthetic oligonucleotide
ttgttgcaaactaagtgccc

SEQ ID NO: 1800 - DNA, 20 bp, Artificial sequence
  Synthetic oligonucleotide
ccagacagtccatcctagat

SEQ ID NO: 1801 - DNA, 20 bp, Artificial sequence
  Synthetic oligonucleotide
tccatttgacctacatctta

SEQ ID NO: 1802 - DNA, 20 bp, Artificial sequence
  Synthetic oligonucleotide
ccaaagacatgactcaggac

SEQ ID NO: 1803 - DNA, 20 bp, Artificial sequence
  Synthetic oligonucleotide
gcaccccactcactcgatct

SEQ ID NO: 1804 - DNA, 20 bp, Artificial sequence
  Synthetic oligonucleotide
tccctgtcccatcctataga

SEQ ID NO: 1805 - DNA, 20 bp, Artificial sequence
  Synthetic oligonucleotide
ttgacacgggcaaccaggac

SEQ ID NO: 1806 - DNA, 20 bp, Artificial sequence
  Synthetic oligonucleotide
gaggagcttcaatctatgcc

SEQ ID NO: 1807 - DNA, 20 bp, Artificial sequence
  Synthetic oligonucleotide
ggtctggccctctaccccca

SEQ ID NO: 1808 - DNA, 20 bp, Artificial sequence
  Synthetic oligonucleotide
ggagcctgccctactcatct

SEQ ID NO: 1809 - DNA, 20 bp, Artificial sequence
  Synthetic oligonucleotide
tgtgaatcaccataaccaga

SEQ ID NO: 1810 - DNA, 20 bp, Artificial sequence
  Synthetic oligonucleotide
cagggatctgtctctatttc

SEQ ID NO: 1811 - DNA, 20 bp, Artificial sequence
  Synthetic oligonucleotide
gtggctggaacatctccggt

SEQ ID NO: 1812 - DNA, 20 bp, Artificial sequence
  Synthetic oligonucleotide
agtcggtcaccagaaaggca

SEQ ID NO: 1813 - DNA, 20 bp, Artificial sequence
  Synthetic oligonucleotide
ggacaagcctcccacagacc

SEQ ID NO: 1814 - DNA, 20 bp, Artificial sequence
  Synthetic oligonucleotide
ggtgtcacaatcctgcagcc

SEQ ID NO: 1815 - DNA, 20 bp, Artificial sequence
  Synthetic oligonucleotide
tgctgcctccagtcacttca

SEQ ID NO: 1816 - DNA, 20 bp, Artificial sequence
  Synthetic oligonucleotide
acagcccccccatcatctca

SEQ ID NO: 1817 - DNA, 20 bp, Artificial sequence
  Synthetic oligonucleotide
atttgatcaaccacagccac

SEQ ID NO: 1818 - DNA, 20 bp, Artificial sequence
  Synthetic oligonucleotide
gttccccgactcctcctcga

SEQ ID NO: 1819 - DNA, 20 bp, Artificial sequence
  Synthetic oligonucleotide
tctggtagaatattccattc

SEQ ID NO: 1820 - DNA, 20 bp, Artificial sequence
  Synthetic oligonucleotide
gctatctaacccacagcccc

SEQ ID NO: 1821 - DNA, 20 bp, Artificial sequence
  Synthetic oligonucleotide
ggtagggccctcactgctgc

SEQ ID NO: 1822 - DNA, 20 bp, Artificial sequence
  Synthetic oligonucleotide
acttatgcaatcccaggctc

SEQ ID NO: 1823 - DNA, 20 bp, Artificial sequence
  Synthetic oligonucleotide
ggccgacacatccgtgggac

SEQ ID NO: 1824 - DNA, 20 bp, Artificial sequence
  Synthetic oligonucleotide
ggctgcactaacccaggaca

SEQ ID NO: 1825 - DNA, 20 bp, Artificial sequence
  Synthetic oligonucleotide
caccccagacgatccacccc

SEQ ID NO: 1826 - DNA, 20 bp, Artificial sequence
  Synthetic oligonucleotide
aaggccctcttcttccgctt

SEQ ID NO: 1827 - DNA, 20 bp, Artificial sequence
  Synthetic oligonucleotide
ccttgacctcctcctggcac

SEQ ID NO: 1828 - DNA, 20 bp, Artificial sequence
  Synthetic oligonucleotide
gctgagaagatcctctctct

SEQ ID NO: 1829 - DNA, 20 bp, Artificial sequence
  Synthetic oligonucleotide
cacacagaaccaccaggtcc

SEQ ID NO: 1830 - DNA, 20 bp, Artificial sequence
  Synthetic oligonucleotide
tgactcctccacccagaccc

SEQ ID NO: 1831 - DNA, 20 bp, Artificial sequence
  Synthetic oligonucleotide
gggccagctattctgagcct

SEQ ID NO: 1832 - DNA, 20 bp, Artificial sequence
  Synthetic oligonucleotide
cccgtgtgtcctcacagtcc

SEQ ID NO: 1833 - DNA, 20 bp, Artificial sequence
  Synthetic oligonucleotide
ccctcggtccagaatggcct

SEQ ID NO: 1834 - DNA, 20 bp, Artificial sequence
  Synthetic oligonucleotide
cgactgagattctaacgcga

SEQ ID NO: 1835 - DNA, 20 bp, Artificial sequence
  Synthetic oligonucleotide
gttttgggccaggatggcct

SEQ ID NO: 1836 - DNA, 20 bp, Artificial sequence
  Synthetic oligonucleotide
cccggcttccccgggccctt

SEQ ID NO: 1837 - DNA, 20 bp, Artificial sequence
  Synthetic oligonucleotide
aacaagaaccacgacagggc

SEQ ID NO: 1838 - DNA, 20 bp, Artificial sequence
  Synthetic oligonucleotide
tcccaatgaaatacatgaca

SEQ ID NO: 1839 - DNA, 20 bp, Artificial sequence
  Synthetic oligonucleotide
cccttcaaccctcctgtgga

SEQ ID NO: 1840 - DNA, 20 bp, Artificial sequence
  Synthetic oligonucleotide
gccgagcccaggaaatgcct

SEQ ID NO: 1841 - DNA, 20 bp, Artificial sequence
  Synthetic oligonucleotide
gagtgtcccagaaagtgcac

SEQ ID NO: 1842 - DNA, 20 bp, Artificial sequence
  Synthetic oligonucleotide
cagttgtcccagactggcca

SEQ ID NO: 1843 - DNA, 20 bp, Artificial sequence
  Synthetic oligonucleotide
gtcagcatcctgatttccct

SEQ ID NO: 1844 - DNA, 20 bp, Artificial sequence
  Synthetic oligonucleotide
acaagctccctcattgaata

SEQ ID NO: 1845 - DNA, 20 bp, Artificial sequence
  Synthetic oligonucleotide
agggacttgccaagcagtcc

SEQ ID NO: 1846 - DNA, 20 bp, Artificial sequence
  Synthetic oligonucleotide
tgggctcttacccacatact

SEQ ID NO: 1847 - DNA, 20 bp, Artificial sequence
  Synthetic oligonucleotide
gagtttggaccccctaggtc

SEQ ID NO: 1848 - DNA, 20 bp, Artificial sequence
  Synthetic oligonucleotide
tgtggactcaccagttgatc

SEQ ID NO: 1849 - DNA, 20 bp, Artificial sequence
  Synthetic oligonucleotide
cgcagacccacctgccacca

SEQ ID NO: 1850 - DNA, 20 bp, Artificial sequence
  Synthetic oligonucleotide
gccagaggctctactcccgg

SEQ ID NO: 1851 - DNA, 20 bp, Artificial sequence
  Synthetic oligonucleotide
ccaacccacatcacagtgtc

SEQ ID NO: 1852 - DNA, 20 bp, Artificial sequence
  Synthetic oligonucleotide
ccgaaattccaaatcctcct

SEQ ID NO: 1853 - DNA, 20 bp, Artificial sequence
  Synthetic oligonucleotide
cggccactcccttcccaggt

SEQ ID NO: 1854 - DNA, 20 bp, Artificial sequence
  Synthetic oligonucleotide
gcagaagaatctacttcctg

SEQ ID NO: 1855 - DNA, 20 bp, Artificial sequence
  Synthetic oligonucleotide
agaacctgcacccgaagccg

SEQ ID NO: 1856 - DNA, 20 bp, Artificial sequence
  Synthetic oligonucleotide
aatttcccatcttcaaggcc

SEQ ID NO: 1857 - DNA, 20 bp, Artificial sequence
  Synthetic oligonucleotide
gtagaagcctcaactagttt

SEQ ID NO: 1858 - DNA, 20 bp, Artificial sequence
  Synthetic oligonucleotide
tcacacccttcactttgtcc

SEQ ID NO: 1859 - DNA, 20 bp, Artificial sequence
  Synthetic oligonucleotide
ccaacccctccacttccgat

SEQ ID NO: 1860 - DNA, 20 bp, Artificial sequence
  Synthetic oligonucleotide
ctgtatacttcatttccaac

SEQ ID NO: 1861 - DNA, 20 bp, Artificial sequence
  Synthetic oligonucleotide
ggatgagtcctcatttgcaa

SEQ ID NO: 1862 - DNA, 20 bp, Artificial sequence
  Synthetic oligonucleotide
acggaccctcctccatgccc

SEQ ID NO: 1863 - DNA, 20 bp, Artificial sequence
  Synthetic oligonucleotide
atctgtcccacatggacccc

SEQ ID NO: 1864 - DNA, 20 bp, Artificial sequence
  Synthetic oligonucleotide
cgagcccccacagccatggc

SEQ ID NO: 1865 - DNA, 20 bp, Artificial sequence
  Synthetic oligonucleotide
acagagccctccatgtagta

SEQ ID NO: 1866 - DNA, 20 bp, Artificial sequence
  Synthetic oligonucleotide
gtctgattcatcctcatttc

SEQ ID NO: 1867 - DNA, 20 bp, Artificial sequence
  Synthetic oligonucleotide
gtttccctatttactgagcc

SEQ ID NO: 1868 - DNA, 20 bp, Artificial sequence
  Synthetic oligonucleotide
gccttcatctacacctgcac

SEQ ID NO: 1869 - DNA, 20 bp, Artificial sequence
  Synthetic oligonucleotide
ccgtgtgtcctcacagtcct

SEQ ID NO: 1870 - DNA, 20 bp, Artificial sequence
  Synthetic oligonucleotide
ccttcatctacacctgcaca

SEQ ID NO: 1871 - DNA, 20 bp, Artificial sequence
  Synthetic oligonucleotide
gcctccagtcacttcacctc

SEQ ID NO: 1872 - DNA, 20 bp, Artificial sequence
  Synthetic oligonucleotide
tttgatcaaccacagccaca

SEQ ID NO: 1873 - DNA, 20 bp, Artificial sequence
  Synthetic oligonucleotide
ctgagaagatcctctctctc

SEQ ID NO: 1874 - DNA, 20 bp, Artificial sequence
  Synthetic oligonucleotide
cccaccctgcttcaaggcct

SEQ ID NO: 1875 - DNA, 20 bp, Artificial sequence
  Synthetic oligonucleotide
tggacatccatctatcatcc

SEQ ID NO: 1876 - DNA, 20 bp, Artificial sequence
  Synthetic oligonucleotide
gctgagaggactcagggact

SEQ ID NO: 1877 - DNA, 20 bp, Artificial sequence
  Synthetic oligonucleotide
cctcactcccgcccttgcct

SEQ ID NO: 1878 - DNA, 20 bp, Artificial sequence
  Synthetic oligonucleotide
ggatctgtctctatttcttc

SEQ ID NO: 1879 - DNA, 20 bp, Artificial sequence
  Synthetic oligonucleotide
cacatggaccccagcaccat

SEQ ID NO: 1880 - DNA, 20 bp, Artificial sequence
  Synthetic oligonucleotide
cccaatgaaatacatgacac

SEQ ID NO: 1881 - DNA, 20 bp, Artificial sequence
  Synthetic oligonucleotide
cagcccccccatcatctcac

SEQ ID NO: 1882 - DNA, 20 bp, Artificial sequence
  Synthetic oligonucleotide
cagttgctccttccttgcca

SEQ ID NO: 1883 - DNA, 20 bp, Artificial sequence
  Synthetic oligonucleotide
gctgcactaacccaggacaa

SEQ ID NO: 1884 - DNA, 20 bp, Artificial sequence
  Synthetic oligonucleotide
tgccctgtaccccatgggcc

SEQ ID NO: 1885 - DNA, 20 bp, Artificial sequence
  Synthetic oligonucleotide
aaagggcacacacatgtctc

SEQ ID NO: 1886 - DNA, 20 bp, Artificial sequence
  Synthetic oligonucleotide
tgacagttcactccagatga

SEQ ID NO: 1887 - DNA, 20 bp, Artificial sequence
  Synthetic oligonucleotide
ccagatgctatcctcatgga

SEQ ID NO: 1888 - DNA, 20 bp, Artificial sequence
  Synthetic oligonucleotide
atcctgatttccctcattgt

SEQ ID NO: 1889 - DNA, 20 bp, Artificial sequence
  Synthetic oligonucleotide
gtggagtgccccagaacggc

SEQ ID NO: 1890 - DNA, 20 bp, Artificial sequence
  Synthetic oligonucleotide
cccacggaacccctctcagc

SEQ ID NO: 1891 - DNA, 20 bp, Artificial sequence
  Synthetic oligonucleotide
tttccctatttactgagcct

SEQ ID NO: 1892 - DNA, 20 bp, Artificial sequence
  Synthetic oligonucleotide
tggctggaacatctccggtt

SEQ ID NO: 1893 - DNA, 20 bp, Artificial sequence
  Synthetic oligonucleotide
ggccactcccttcccaggtg

SEQ ID NO: 1894 - DNA, 20 bp, Artificial sequence
  Synthetic oligonucleotide
atttcccatcttcaaggccc

SEQ ID NO: 1895 - DNA, 20 bp, Artificial sequence
  Synthetic oligonucleotide
tcttgttgtcctcccgcttc

SEQ ID NO: 1896 - DNA, 20 bp, Artificial sequence
  Synthetic oligonucleotide
aaatcctcctgataatcctc

SEQ ID NO: 1897 - DNA, 20 bp, Artificial sequence
  Synthetic oligonucleotide
aggtgatgccccacaagaca

SEQ ID NO: 1898 - DNA, 20 bp, Artificial sequence
  Synthetic oligonucleotide
ccagacgatccaccccagat

SEQ ID NO: 1899 - DNA, 20 bp, Artificial sequence
  Synthetic oligonucleotide
agaatattccattccccgca

SEQ ID NO: 1900 - DNA, 20 bp, Artificial sequence
  Synthetic oligonucleotide
cccactgcaacatctttccc

SEQ ID NO: 1901 - DNA, 20 bp, Artificial sequence
  Synthetic oligonucleotide
gtgaatcaccataaccagac

SEQ ID NO: 1902 - DNA, 20 bp, Artificial sequence
  Synthetic oligonucleotide
gagctcctcagcatgggccc

SEQ ID NO: 1903 - DNA, 20 bp, Artificial sequence
  Synthetic oligonucleotide
gactcctccacccagaccct

SEQ ID NO: 1904 - DNA, 20 bp, Artificial sequence
  Synthetic oligonucleotide
agaatctacttcctgtgtcc

SEQ ID NO: 1905 - DNA, 20 bp, Artificial sequence
  Synthetic oligonucleotide
gagtgtgccatccccagggt

SEQ ID NO: 1906 - DNA, 20 bp, Artificial sequence
  Synthetic oligonucleotide
cacagtgtcccccacgggca

SEQ ID NO: 1907 - DNA, 20 bp, Artificial sequence
  Synthetic oligonucleotide
gtgagctgaaatatcatgcc

SEQ ID NO: 1908 - DNA, 20 bp, Artificial sequence
  Synthetic oligonucleotide
ctatctaacccacagccccc

SEQ ID NO: 1909 - DNA, 20 bp, Artificial sequence
  Synthetic oligonucleotide
gacgcaggcatcccactcat

SEQ ID NO: 1910 - DNA, 20 bp, Artificial sequence
  Synthetic oligonucleotide
ccctggcccctctagcacca

SEQ ID NO: 1911 - DNA, 20 bp, Artificial sequence
  Synthetic oligonucleotide
agctccctcattgaataatt

SEQ ID NO: 1912 - DNA, 20 bp, Artificial sequence
  Synthetic oligonucleotide
ccggctgtccaccttgaccc

SEQ ID NO: 1913 - DNA, 20 bp, Artificial sequence
  Synthetic oligonucleotide
ttcccacgacatcttttgca

SEQ ID NO: 1914 - DNA, 20 bp, Artificial sequence
  Synthetic oligonucleotide
ccattgggcacttttactca

SEQ ID NO: 1915 - DNA, 20 bp, Artificial sequence
  Synthetic oligonucleotide
ggcaccccagaaacaagagc

SEQ ID NO: 1916 - DNA, 20 bp, Artificial sequence
  Synthetic oligonucleotide
gtgcaccgacacattctgga

SEQ ID NO: 1917 - DNA, 20 bp, Artificial sequence
  Synthetic oligonucleotide
ttccccgggccctttgctgc

SEQ ID NO: 1918 - DNA, 20 bp, Artificial sequence
  Synthetic oligonucleotide
gtgtcacaatcctgcagcca

SEQ ID NO: 1919 - DNA, 20 bp, Artificial sequence
  Synthetic oligonucleotide
gacaagcctcccacagacca

SEQ ID NO: 1920 - DNA, 20 bp, Artificial sequence
  Synthetic oligonucleotide
tccccgactcctcctcgaac

SEQ ID NO: 1921 - DNA, 20 bp, Artificial sequence
  Synthetic oligonucleotide
cctcggcccaatctgaactt

SEQ ID NO: 1922 - DNA, 20 bp, Artificial sequence
  Synthetic oligonucleotide
ttgagccgctccttgaaggt

SEQ ID NO: 1923 - DNA, 20 bp, Artificial sequence
  Synthetic oligonucleotide
cctgccctactcatctcagc

SEQ ID NO: 1924 - DNA, 20 bp, Artificial sequence
  Synthetic oligonucleotide
tcaggaccttccagagattt

SEQ ID NO: 1925 - DNA, 20 bp, Artificial sequence
  Synthetic oligonucleotide
cctgtcccatcctatagaca

SEQ ID NO: 1926 - DNA, 20 bp, Artificial sequence
  Synthetic oligonucleotide
aggagcttcaatctatgcct

SEQ ID NO: 1927 - DNA, 20 bp, Artificial sequence
  Synthetic oligonucleotide
agggatgattctagaaggcc

SEQ ID NO: 1928 - DNA, 20 bp, Artificial sequence
  Synthetic oligonucleotide
ccatttcatttccaggctta

SEQ ID NO: 1929 - DNA, 20 bp, Artificial sequence
  Synthetic oligonucleotide
ttcatcctcatttcccccgc

SEQ ID NO: 1930 - DNA, 20 bp, Artificial sequence
  Synthetic oligonucleotide
ccgaagccgtcacctccctc

SEQ ID NO: 1931 - DNA, 20 bp, Artificial sequence
  Synthetic oligonucleotide
gggctcacccctcacctggt

SEQ ID NO: 1932 - DNA, 20 bp, Artificial sequence
  Synthetic oligonucleotide
ggccaaccatcccccaccaa

SEQ ID NO: 1933 - DNA, 20 bp, Artificial sequence
  Synthetic oligonucleotide
tccccaagcaccacatgacc

SEQ ID NO: 1934 - DNA, 20 bp, Artificial sequence
  Synthetic oligonucleotide
aatggcctcaccttgagatc

SEQ ID NO: 1935 - DNA, 20 bp, Artificial sequence
  Synthetic oligonucleotide
tgctcgctcacagcctgcca

SEQ ID NO: 1936 - DNA, 20 bp, Artificial sequence
  Synthetic oligonucleotide
ccaggtggttcctcctgcca

SEQ ID NO: 1937 - DNA, 20 bp, Artificial sequence
  Synthetic oligonucleotide
aggcttctccatgtgaagct

SEQ ID NO: 1938 - DNA, 20 bp, Artificial sequence
  Synthetic oligonucleotide
atttgacctacatcttagct

SEQ ID NO: 1939 - DNA, 20 bp, Artificial sequence
  Synthetic oligonucleotide
ggctcttacccacatacttg

SEQ ID NO: 1940 - DNA, 20 bp, Artificial sequence
  Synthetic oligonucleotide
caacccctccacttccgatt

SEQ ID NO: 1941 - DNA, 20 bp, Artificial sequence
  Synthetic oligonucleotide
gacatgactcaggacaggcc

SEQ ID NO: 1942 - DNA, 20 bp, Artificial sequence
  Synthetic oligonucleotide
agtttggaccccctaggtcc

SEQ ID NO: 1943 - DNA, 20 bp, Artificial sequence
  Synthetic oligonucleotide
ctgagattctaacgcgagcc

SEQ ID NO: 1944 - DNA, 20 bp, Artificial sequence
  Synthetic oligonucleotide
cctgaggccacacgcagaca

SEQ ID NO: 1945 - DNA, 20 bp, Artificial sequence
  Synthetic oligonucleotide
aaggtggttgcaacctgcac

SEQ ID NO: 1946 - DNA, 20 bp, Artificial sequence
  Synthetic oligonucleotide
tgctgatgtcccctgggacc

SEQ ID NO: 1947 - DNA, 20 bp, Artificial sequence
  Synthetic oligonucleotide
gtccctgtcacacaactgcc

SEQ ID NO: 1948 - DNA, 20 bp, Artificial sequence
  Synthetic oligonucleotide
aggtggttcctcctgccaga

SEQ ID NO: 1949 - DNA, 20 bp, Artificial sequence
  Synthetic oligonucleotide
gagtttgtccccagtgctca

SEQ ID NO: 1950 - DNA, 20 bp, Artificial sequence
  Synthetic oligonucleotide
gggcctcctactcacccacc

SEQ ID NO: 1951 - DNA, 20 bp, Artificial sequence
  Synthetic oligonucleotide
gcctaggaccccctgacagc

SEQ ID NO: 1952 - DNA, 20 bp, Artificial sequence
  Synthetic oligonucleotide
tgctccttccttgccaagct

SEQ ID NO: 1953 - DNA, 20 bp, Artificial sequence
  Synthetic oligonucleotide
tgccctactcatctcagcgc

SEQ ID NO: 1954 - DNA, 20 bp, Artificial sequence
  Synthetic oligonucleotide
accttgagatcctcaactaa

SEQ ID NO: 1955 - DNA, 20 bp, Artificial sequence
  Synthetic oligonucleotide
gcctggttatgaaatgcgca

SEQ ID NO: 1956 - DNA, 20 bp, Artificial sequence
  Synthetic oligonucleotide
tgagattctaacgcgagccg

SEQ ID NO: 1957 - DNA, 20 bp, Artificial sequence
  Synthetic oligonucleotide
cctgcagattcacctctgta

SEQ ID NO: 1958 - DNA, 20 bp, Artificial sequence
  Synthetic oligonucleotide
gcaacatctttccctcactc

SEQ ID NO: 1959 - DNA, 20 bp, Artificial sequence
  Synthetic oligonucleotide
tgttttgacacccttgggcc

SEQ ID NO: 1960 - DNA, 20 bp, Artificial sequence
  Synthetic oligonucleotide
acctcaggctcctgtaccct

SEQ ID NO: 1961 - DNA, 20 bp, Artificial sequence
  Synthetic oligonucleotide
cagatgctatcctcatggat

SEQ ID NO: 1962 - DNA, 20 bp, Artificial sequence
  Synthetic oligonucleotide
ctggagaggacccacagcca

SEQ ID NO: 1963 - DNA, 20 bp, Artificial sequence
  Synthetic oligonucleotide
gccctggtcaccgacagcct

SEQ ID NO: 1964 - DNA, 20 bp, Artificial sequence
  Synthetic oligonucleotide
cacgcaggtcccagcagctc

SEQ ID NO: 1965 - DNA, 20 bp, Artificial sequence
  Synthetic oligonucleotide
agttcactccagatgatcca

SEQ ID NO: 1966 - DNA, 20 bp, Artificial sequence
  Synthetic oligonucleotide
atgggccccctgcccagtgc

SEQ ID NO: 1967 - DNA, 20 bp, Artificial sequence
  Synthetic oligonucleotide
acggagtcccaggaaaacaa

SEQ ID NO: 1968 - DNA, 20 bp, Artificial sequence
  Synthetic oligonucleotide
tgcaccgacacattctggaa

SEQ ID NO: 1969 - DNA, 20 bp, Artificial sequence
  Synthetic oligonucleotide
ccacggaacccctctcagca

SEQ ID NO: 1970 - DNA, 20 bp, Artificial sequence
  Synthetic oligonucleotide
cgatccaccccagatggtcc

SEQ ID NO: 1971 - DNA, 20 bp, Artificial sequence
  Synthetic oligonucleotide
ttgaataattaatcaaggac

SEQ ID NO: 1972 - DNA, 20 bp, Artificial sequence
  Synthetic oligonucleotide
cctcatccataaacaggcag

SEQ ID NO: 1973 - DNA, 20 bp, Artificial sequence
  Synthetic oligonucleotide
tcaccgcgccatgactgcac

SEQ ID NO: 1974 - DNA, 20 bp, Artificial sequence
  Synthetic oligonucleotide
aaggagagtcccccttttta

SEQ ID NO: 1975 - DNA, 20 bp, Artificial sequence
  Synthetic oligonucleotide
gcaggcatcccactcatgaa

SEQ ID NO: 1976 - DNA, 20 bp, Artificial sequence
  Synthetic oligonucleotide
ccccccatcatctcacagtc

SEQ ID NO: 1977 - DNA, 20 bp, Artificial sequence
  Synthetic oligonucleotide
agagtgccccatcatgccct

SEQ ID NO: 1978 - DNA, 20 bp, Artificial sequence
  Synthetic oligonucleotide
gcactaacccaggacaacaa

SEQ ID NO: 1979 - DNA, 20 bp, Artificial sequence
  Synthetic oligonucleotide
cccaagcaccacatgaccca

SEQ ID NO: 1980 - DNA, 20 bp, Artificial sequence
  Synthetic oligonucleotide
ctgatttccctcattgttgc

SEQ ID NO: 1981 - DNA, 20 bp, Artificial sequence
  Synthetic oligonucleotide
ggagcttcaatctatgcctc

SEQ ID NO: 1982 - DNA, 20 bp, Artificial sequence
  Synthetic oligonucleotide
ttcccggtcctctacaggtc

SEQ ID NO: 1983 - DNA, 20 bp, Artificial sequence
  Synthetic oligonucleotide
tgaatcaccataaccagacc

SEQ ID NO: 1984 - DNA, 20 bp, Artificial sequence
  Synthetic oligonucleotide
ccccgactcctcctcgaacc

SEQ ID NO: 1985 - DNA, 20 bp, Artificial sequence
  Synthetic oligonucleotide
tttgacctacatcttagctg

SEQ ID NO: 1986 - DNA, 20 bp, Artificial sequence
  Synthetic oligonucleotide
ccacccagaccctccgacct

SEQ ID NO: 1987 - DNA, 20 bp, Artificial sequence
  Synthetic oligonucleotide
ttccagagatttcctcctgc

SEQ ID NO: 1988 - DNA, 20 bp, Artificial sequence
  Synthetic oligonucleotide
gaagccgtcacctccctccc

SEQ ID NO: 1989 - DNA, 20 bp, Artificial sequence
  Synthetic oligonucleotide
acagtgtcccccacgggcat

SEQ ID NO: 1990 - DNA, 20 bp, Artificial sequence
  Synthetic oligonucleotide
ctagaaggccctcagcacac

SEQ ID NO: 1991 - DNA, 20 bp, Artificial sequence
  Synthetic oligonucleotide
cacgcagacaccaagggcac

SEQ ID NO: 1992 - DNA, 20 bp, Artificial sequence
  Synthetic oligonucleotide
cggctgtccaccttgaccct

SEQ ID NO: 1993 - DNA, 20 bp, Artificial sequence
  Synthetic oligonucleotide
ctgtcccatcctatagacac

SEQ ID NO: 1994 - DNA, 20 bp, Artificial sequence
  Synthetic oligonucleotide
ctgtgtccattctcatccac

SEQ ID NO: 1995 - DNA, 20 bp, Artificial sequence
  Synthetic oligonucleotide
ccttcactgactatgtgcct

SEQ ID NO: 1996 - DNA, 20 bp, Artificial sequence
  Synthetic oligonucleotide
atcgagtcatctgggagccc

SEQ ID NO: 1997 - DNA, 20 bp, Artificial sequence
  Synthetic oligonucleotide
gcacggaacatgcttagggc

SEQ ID NO: 1998 - DNA, 20 bp, Artificial sequence
  Synthetic oligonucleotide
tgagaggactcagggacttg

SEQ ID NO: 1999 - DNA, 20 bp, Artificial sequence
  Synthetic oligonucleotide
cccacctgcacagatggcac

SEQ ID NO: 2000 - DNA, 20 bp, Artificial sequence
  Synthetic oligonucleotide
gtgtgccatccccagggtca

SEQ ID NO: 2001 - DNA, 20 bp, Artificial sequence
  Synthetic oligonucleotide
ctccacttccgattctgtcc

SEQ ID NO: 2002 - DNA, 20 bp, Artificial sequence
  Synthetic oligonucleotide
gagaagatcctctctctcca

SEQ ID NO: 2003 - DNA, 20 bp, Artificial sequence
  Synthetic oligonucleotide
ccaatgaaatacatgacaca

SEQ ID NO: 2004 - DNA, 20 bp, Artificial sequence
  Synthetic oligonucleotide
cttcaaggccctccacttaa

SEQ ID NO: 2005 - DNA, 20 bp, Artificial sequence
  Synthetic oligonucleotide
gcacacgccatacctgggca

SEQ ID NO: 2006 - DNA, 20 bp, Artificial sequence
  Synthetic oligonucleotide
ggctcacccctcacctggtc

SEQ ID NO: 2007 - DNA, 20 bp, Artificial sequence
  Synthetic oligonucleotide
ccctaggtcccttctcggat

SEQ ID NO: 2008 - DNA, 20 bp, Artificial sequence
  Synthetic oligonucleotide
cctccagtcacttcacctct

SEQ ID NO: 2009 - DNA, 20 bp, Artificial sequence
  Synthetic oligonucleotide
ttgggcacttttactcaaaa

SEQ ID NO: 2010 - DNA, 20 bp, Artificial sequence
  Synthetic oligonucleotide
tcatcctcatttcccccgca

SEQ ID NO: 2011 - DNA, 20 bp, Artificial sequence
  Synthetic oligonucleotide
cctgactgacttcttccaac

SEQ ID NO: 2012 - DNA, 20 bp, Artificial sequence
  Synthetic oligonucleotide
gctcttacccacatacttgt

SEQ ID NO: 2013 - DNA, 20 bp, Artificial sequence
  Synthetic oligonucleotide
tcccacgacatcttttgcag

SEQ ID NO: 2014 - DNA, 20 bp, Artificial sequence
  Synthetic oligonucleotide
tcagaagcacccagaagccg

SEQ ID NO: 2015 - DNA, 20 bp, Artificial sequence
  Synthetic oligonucleotide
gttttaagacccccttttta

SEQ ID NO: 2016 - DNA, 20 bp, Artificial sequence
  Synthetic oligonucleotide
tggatcagacacccatgccg

SEQ ID NO: 2017 - DNA, 20 bp, Artificial sequence
  Synthetic oligonucleotide
ggacgaagcttcctcttgcc

SEQ ID NO: 2018 - DNA, 20 bp, Artificial sequence
  Synthetic oligonucleotide
ggacatccatctatcatcca

SEQ ID NO: 2019 - DNA, 20 bp, Artificial sequence
  Synthetic oligonucleotide
tgtgtcctcacagtcctcca

SEQ ID NO: 2020 - DNA, 20 bp, Artificial sequence
  Synthetic oligonucleotide
tgataatcctctcctccccc

SEQ ID NO: 2021 - DNA, 20 bp, Artificial sequence
  Synthetic oligonucleotide
tccccgggccctttgctgct

SEQ ID NO: 2022 - DNA, 20 bp, Artificial sequence
  Synthetic oligonucleotide
acccgcttccctcacagagc

SEQ ID NO: 2023 - DNA, 20 bp, Artificial sequence
  Synthetic oligonucleotide
ctcagggacttgccaagcag

SEQ ID NO: 2024 - DNA, 20 bp, Artificial sequence
  Synthetic oligonucleotide
ctagctagcacacacagcca

SEQ ID NO: 2025 - DNA, 20 bp, Artificial sequence
  Synthetic oligonucleotide
cccagaccctccgaccttta

SEQ ID NO: 2026 - DNA, 20 bp, Artificial sequence
  Synthetic oligonucleotide
gggctgcccgtattcttcct

SEQ ID NO: 2027 - DNA, 20 bp, Artificial sequence
  Synthetic oligonucleotide
ggtggttcctcctgccagac

SEQ ID NO: 2028 - DNA, 20 bp, Artificial sequence
  Synthetic oligonucleotide
gtatggtccacctaaatggt

SEQ ID NO: 2029 - DNA, 20 bp, Artificial sequence
  Synthetic oligonucleotide
ggaggctgaattgtgcttca

SEQ ID NO: 2030 - DNA, 20 bp, Artificial sequence
  Synthetic oligonucleotide
acccaggacaacaaacaagc

SEQ ID NO: 2031 - DNA, 20 bp, Artificial sequence
  Synthetic oligonucleotide
gagcttcaatctatgcctca

SEQ ID NO: 2032 - DNA, 20 bp, Artificial sequence
  Synthetic oligonucleotide
acgcctctcctctgtgtgcc

SEQ ID NO: 2033 - DNA, 20 bp, Artificial sequence
  Synthetic oligonucleotide
gccctactcatctcagcgcg

SEQ ID NO: 2034 - DNA, 20 bp, Artificial sequence
  Synthetic oligonucleotide
cctctggaaagaatgtgcct

SEQ ID NO: 2035 - DNA, 20 bp, Artificial sequence
  Synthetic oligonucleotide
ggtccgagcatcagaatcaa

SEQ ID NO: 2036 - DNA, 20 bp, Artificial sequence
  Synthetic oligonucleotide
gatgctatcctcatggatgc

SEQ ID NO: 2037 - DNA, 20 bp, Artificial sequence
  Synthetic oligonucleotide
gccctcagcacaccgagtca

SEQ ID NO: 2038 - DNA, 20 bp, Artificial sequence
  Synthetic oligonucleotide
ggcgggatcatcctctgcca

SEQ ID NO: 2039 - DNA, 20 bp, Artificial sequence
  Synthetic oligonucleotide
agagtaggtcccagcagccg

SEQ ID NO: 2040 - DNA, 20 bp, Artificial sequence
  Synthetic oligonucleotide
tgtgtccattctcatccact

SEQ ID NO: 2041 - DNA, 20 bp, Artificial sequence
  Synthetic oligonucleotide
agggtcacgctagtgccacc

SEQ ID NO: 2042 - DNA, 20 bp, Artificial sequence
  Synthetic oligonucleotide
gccccaggcaccattaggcg

SEQ ID NO: 2043 - DNA, 20 bp, Artificial sequence
  Synthetic oligonucleotide
gcaccgacacattctggaaa

SEQ ID NO: 2044 - DNA, 20 bp, Artificial sequence
  Synthetic oligonucleotide
ttgacctacatcttagctga

SEQ ID NO: 2045 - DNA, 20 bp, Artificial sequence
  Synthetic oligonucleotide
gccagagacattaatgaagc

SEQ ID NO: 2046 - DNA, 20 bp, Artificial sequence
  Synthetic oligonucleotide
accagagccatcagcaggtc

SEQ ID NO: 2047 - DNA, 20 bp, Artificial sequence
  Synthetic oligonucleotide
ccccgggccctttgctgctt

SEQ ID NO: 2048 - DNA, 20 bp, Artificial sequence
  Synthetic oligonucleotide
gaaagacccatccccagaga

SEQ ID NO: 2049 - DNA, 20 bp, Artificial sequence
  Synthetic oligonucleotide
tggaccagctcctcctcaaa

SEQ ID NO: 2050 - DNA, 20 bp, Artificial sequence
  Synthetic oligonucleotide
gtgctgtcccagcttgagca

SEQ ID NO: 2051 - DNA, 20 bp, Artificial sequence
  Synthetic oligonucleotide
ccgattctgtcctccagggc

SEQ ID NO: 2052 - DNA, 20 bp, Artificial sequence
  Synthetic oligonucleotide
tctggaagactccgcagctc

SEQ ID NO: 2053 - DNA, 20 bp, Artificial sequence
  Synthetic oligonucleotide
cgactcctcctcgaaccttc

SEQ ID NO: 2054 - DNA, 20 bp, Artificial sequence
  Synthetic oligonucleotide
tctgccgtcccctccagcac

SEQ ID NO: 2055 - DNA, 20 bp, Artificial sequence
  Synthetic oligonucleotide
tccctgtcacacaactgcca

SEQ ID NO: 2056 - DNA, 20 bp, Artificial sequence
  Synthetic oligonucleotide
gtcccatcctatagacacca

SEQ ID NO: 2057 - DNA, 20 bp, Artificial sequence
  Synthetic oligonucleotide
cccacgacatcttttgcagc

SEQ ID NO: 2058 - DNA, 20 bp, Artificial sequence
  Synthetic oligonucleotide
cccccatcatctcacagtct

SEQ ID NO: 2059 - DNA, 20 bp, Artificial sequence
  Synthetic oligonucleotide
cctgaccccaccactgaagc

SEQ ID NO: 2060 - DNA, 20 bp, Artificial sequence
  Synthetic oligonucleotide
cccaggacccccccatggtc

SEQ ID NO: 2061 - DNA, 20 bp, Artificial sequence
  Synthetic oligonucleotide
gcgagggccacaacacagta

SEQ ID NO: 2062 - DNA, 20 bp, Artificial sequence
  Synthetic oligonucleotide
gttttgacacccttgggcct

SEQ ID NO: 2063 - DNA, 20 bp, Artificial sequence
  Synthetic oligonucleotide
ggtcccctacttactaagcc

SEQ ID NO: 2064 - DNA, 20 bp, Artificial sequence
  Synthetic oligonucleotide
aggatgcattccatccagat

SEQ ID NO: 2065 - DNA, 20 bp, Artificial sequence
  Synthetic oligonucleotide
tgcagattcacctctgtatt

SEQ ID NO: 2066 - DNA, 20 bp, Artificial sequence
  Synthetic oligonucleotide
accgacagcctctgtggccc

SEQ ID NO: 2067 - DNA, 20 bp, Artificial sequence
  Synthetic oligonucleotide
atacatgacacacctggtga

SEQ ID NO: 2068 - DNA, 20 bp, Artificial sequence
  Synthetic oligonucleotide
agaccccctttttacaaatc

SEQ ID NO: 2069 - DNA, 20 bp, Artificial sequence
  Synthetic oligonucleotide
gactgacttcttccaacttt

SEQ ID NO: 2070 - DNA, 20 bp, Artificial sequence
  Synthetic oligonucleotide
ggcatcccactcatgaaggc

SEQ ID NO: 2071 - DNA, 20 bp, Artificial sequence
  Synthetic oligonucleotide
gcaccggcaacttcaggtac

SEQ ID NO: 2072 - DNA, 20 bp, Artificial sequence
  Synthetic oligonucleotide
gtctcagccctgcttagggc

SEQ ID NO: 2073 - DNA, 20 bp, Artificial sequence
  Synthetic oligonucleotide
accccaccccacatggtggt

SEQ ID NO: 2074 - DNA, 20 bp, Artificial sequence
  Synthetic oligonucleotide
cccaaactcacaccagaagc

SEQ ID NO: 2075 - DNA, 20 bp, Artificial sequence
  Synthetic oligonucleotide
acaggtcttaatctctggac

SEQ ID NO: 2076 - DNA, 20 bp, Artificial sequence
  Synthetic oligonucleotide
caaggccctccacttaatca

SEQ ID NO: 2077 - DNA, 20 bp, Artificial sequence
  Synthetic oligonucleotide
ggatcagacacccatgccgg

SEQ ID NO: 2078 - DNA, 20 bp, Artificial sequence
  Synthetic oligonucleotide
ctcttacccacatacttgtc

SEQ ID NO: 2079 - DNA, 20 bp, Artificial sequence
  Synthetic oligonucleotide
gcggctcgctcacattccct

SEQ ID NO: 2080 - DNA, 20 bp, Artificial sequence
  Synthetic oligonucleotide
gacgaagcttcctcttgcct

SEQ ID NO: 2081 - DNA, 20 bp, Artificial sequence
  Synthetic oligonucleotide
caccataaccagacccggca

SEQ ID NO: 2082 - DNA, 20 bp, Artificial sequence
  Synthetic oligonucleotide
gcaatggacccactgagttt

SEQ ID NO: 2083 - DNA, 20 bp, Artificial sequence
  Synthetic oligonucleotide
ggatggcccaccccagacaa

SEQ ID NO: 2084 - DNA, 20 bp, Artificial sequence
  Synthetic oligonucleotide
ccagagatttcctcctgctt

SEQ ID NO: 2085 - DNA, 20 bp, Artificial sequence
  Synthetic oligonucleotide
gcacagtgtcttccagggcc

SEQ ID NO: 2086 - DNA, 20 bp, Artificial sequence
  Synthetic oligonucleotide
aacatctttccctcactcgc

SEQ ID NO: 2087 - DNA, 20 bp, Artificial sequence
  Synthetic oligonucleotide
ctccagtcacttcacctctt

SEQ ID NO: 2088 - DNA, 20 bp, Artificial sequence
  Synthetic oligonucleotide
cgtgcaacattttcaagcct

SEQ ID NO: 2089 - DNA, 20 bp, Artificial sequence
  Synthetic oligonucleotide
gctaacccccacatcagagc

SEQ ID NO: 2090 - DNA, 20 bp, Artificial sequence
  Synthetic oligonucleotide
cccgcttccctcacagagcc

SEQ ID NO: 2091 - DNA, 20 bp, Artificial sequence
  Synthetic oligonucleotide
gagagtccccctttttagga

SEQ ID NO: 2092 - DNA, 20 bp, Artificial sequence
  Synthetic oligonucleotide
caccacatgacccacaggca

SEQ ID NO: 2093 - DNA, 20 bp, Artificial sequence
  Synthetic oligonucleotide
acgggcatccttgtgtgccc

SEQ ID NO: 2094 - DNA, 20 bp, Artificial sequence
  Synthetic oligonucleotide
cacggaacccctctcagcac

SEQ ID NO: 2095 - DNA, 20 bp, Artificial sequence
  Synthetic oligonucleotide
cttgagatcctcaactaatc

SEQ ID NO: 2096 - DNA, 20 bp, Artificial sequence
  Synthetic oligonucleotide
gctgtccaccttgacccttc

SEQ ID NO: 2097 - DNA, 20 bp, Artificial sequence
  Synthetic oligonucleotide
cattgttgcccacccattcc

SEQ ID NO: 2098 - DNA, 20 bp, Artificial sequence
  Synthetic oligonucleotide
accatctgctcatcatccat

SEQ ID NO: 2099 - DNA, 20 bp, Artificial sequence
  Synthetic oligonucleotide
atcctcatttcccccgcagc

SEQ ID NO: 2100 - DNA, 20 bp, Artificial sequence
  Synthetic oligonucleotide
ctgctcatcatccatccact

SEQ ID NO: 2101 - DNA, 20 bp, Artificial sequence
  Synthetic oligonucleotide
ggtcacgctagtgccaccgt

SEQ ID NO: 2102 - DNA, 20 bp, Artificial sequence
  Synthetic oligonucleotide
tgaattgtgcttcacaagtc

SEQ ID NO: 2103 - DNA, 20 bp, Artificial sequence
  Synthetic oligonucleotide
ccaggactgttcactgctct

SEQ ID NO: 2104 - DNA, 20 bp, Artificial sequence
  Synthetic oligonucleotide
gtgcaacattttcaagcctc

SEQ ID NO: 2105 - DNA, 20 bp, Artificial sequence
  Synthetic oligonucleotide
accccctttttacaaatctt

SEQ ID NO: 2106 - DNA, 20 bp, Artificial sequence
  Synthetic oligonucleotide
cgagcatcagaatcaataac

SEQ ID NO: 2107 - DNA, 20 bp, Artificial sequence
  Synthetic oligonucleotide
cgggagccacagtctccaca

SEQ ID NO: 2108 - DNA, 20 bp, Artificial sequence
  Synthetic oligonucleotide
gatgtttcttccctctgacc

SEQ ID NO: 2109 - DNA, 20 bp, Artificial sequence
  Synthetic oligonucleotide
acggaacccctctcagcaca

SEQ ID NO: 2110 - DNA, 20 bp, Artificial sequence
  Synthetic oligonucleotide
aggagcctcacttgttgtcc

SEQ ID NO: 2111 - DNA, 20 bp, Artificial sequence
  Synthetic oligonucleotide
ggatgcattccatccagata

SEQ ID NO: 2112 - DNA, 20 bp, Artificial sequence
  Synthetic oligonucleotide
cctcctcgaaccttcacggc

SEQ ID NO: 2113 - DNA, 20 bp, Artificial sequence
  Synthetic oligonucleotide
ttttccggcatttctgcttt

SEQ ID NO: 2114 - DNA, 20 bp, Artificial sequence
  Synthetic oligonucleotide
gccttttctaagaaaactcc

SEQ ID NO: 2115 - DNA, 20 bp, Artificial sequence
  Synthetic oligonucleotide
accttgacccttccctgcac

SEQ ID NO: 2116 - DNA, 20 bp, Artificial sequence
  Synthetic oligonucleotide
gagatcctcaactaatcaca

SEQ ID NO: 2117 - DNA, 20 bp, Artificial sequence
  Synthetic oligonucleotide
ccccaggcaccattaggcgg

SEQ ID NO: 2118 - DNA, 20 bp, Artificial sequence
  Synthetic oligonucleotide
tcttacccacatacttgtcc

SEQ ID NO: 2119 - DNA, 20 bp, Artificial sequence
  Synthetic oligonucleotide
cgaagcttcctcttgcctgc

SEQ ID NO: 2120 - DNA, 20 bp, Artificial sequence
  Synthetic oligonucleotide
gaccctccgacctttactcc

SEQ ID NO: 2121 - DNA, 20 bp, Artificial sequence
  Synthetic oligonucleotide
gcagggctgttcctagagac

SEQ ID NO: 2122 - DNA, 20 bp, Artificial sequence
  Synthetic oligonucleotide
cttgtgtgccctccaccagc

SEQ ID NO: 2123 - DNA, 20 bp, Artificial sequence
  Synthetic oligonucleotide
ggcaggtcagcatcacagac

SEQ ID NO: 2124 - DNA, 20 bp, Artificial sequence
  Synthetic oligonucleotide
aaggccctccacttaatcat

SEQ ID NO: 2125 - DNA, 20 bp, Artificial sequence
  Synthetic oligonucleotide
gaggagagatcacacaggct

SEQ ID NO: 2126 - DNA, 20 bp, Artificial sequence
  Synthetic oligonucleotide
ctgaattgcacccccagatt

SEQ ID NO: 2127 - DNA, 20 bp, Artificial sequence
  Synthetic oligonucleotide
gaggcgagctttacactttt

SEQ ID NO: 2128 - DNA, 20 bp, Artificial sequence
  Synthetic oligonucleotide
catggatgccccaatctgcc

SEQ ID NO: 2129 - DNA, 20 bp, Artificial sequence
  Synthetic oligonucleotide
ctgaccccaccactgaagcc

SEQ ID NO: 2130 - DNA, 20 bp, Artificial sequence
  Synthetic oligonucleotide
gcgggatcatcctctgccag

SEQ ID NO: 2131 - DNA, 20 bp, Artificial sequence
  Synthetic oligonucleotide
gggccatccccacttgactt

SEQ ID NO: 2132 - DNA, 20 bp, Artificial sequence
  Synthetic oligonucleotide
gtcagccagatatcaaggca

SEQ ID NO: 2133 - DNA, 20 bp, Artificial sequence
  Synthetic oligonucleotide
gacttcttccaactttccaa

SEQ ID NO: 2134 - DNA, 20 bp, Artificial sequence
  Synthetic oligonucleotide
gctgagcccccacattgcac

SEQ ID NO: 2135 - DNA, 20 bp, Artificial sequence
  Synthetic oligonucleotide
ccagagacattaatgaagcc

SEQ ID NO: 2136 - DNA, 20 bp, Artificial sequence
  Synthetic oligonucleotide
ccagacgcaccatcacccaa

SEQ ID NO: 2137 - DNA, 20 bp, Artificial sequence
  Synthetic oligonucleotide
cccgggccctttgctgcttc

SEQ ID NO: 2138 - DNA, 20 bp, Artificial sequence
  Synthetic oligonucleotide
tctgacagtcatatttaacc

SEQ ID NO: 2139 - DNA, 20 bp, Artificial sequence
  Synthetic oligonucleotide
ccctactcatctcagcgcga

SEQ ID NO: 2140 - DNA, 20 bp, Artificial sequence
  Synthetic oligonucleotide
acatctttccctcactcgcc

SEQ ID NO: 2141 - DNA, 20 bp, Artificial sequence
  Synthetic oligonucleotide
agcagccgccacttctcgaa

SEQ ID NO: 2142 - DNA, 20 bp, Artificial sequence
  Synthetic oligonucleotide
gagtgtggaaaatctagttt

SEQ ID NO: 2143 - DNA, 20 bp, Artificial sequence
  Synthetic oligonucleotide
ctcggcataacacatggccc

SEQ ID NO: 2144 - DNA, 20 bp, Artificial sequence
  Synthetic oligonucleotide
agtttccccctccatacaac

SEQ ID NO: 2145 - DNA, 20 bp, Artificial sequence
  Synthetic oligonucleotide
ccgccgtctttctctctgaa

SEQ ID NO: 2146 - DNA, 20 bp, Artificial sequence
  Synthetic oligonucleotide
taagcaccagcctaacccct

SEQ ID NO: 2147 - DNA, 20 bp, Artificial sequence
  Synthetic oligonucleotide
attgttgcccacccattcca

SEQ ID NO: 2148 - DNA, 20 bp, Artificial sequence
  Synthetic oligonucleotide
ggtccgagcaccacagtgcc

SEQ ID NO: 2149 - DNA, 20 bp, Artificial sequence
  Synthetic oligonucleotide
ctcgctcacattccctggga

SEQ ID NO: 2150 - DNA, 20 bp, Artificial sequence
  Synthetic oligonucleotide
cagggtagccctgccaagca

SEQ ID NO: 2151 - DNA, 20 bp, Artificial sequence
  Synthetic oligonucleotide
agatgcttccccctgcccgc

SEQ ID NO: 2152 - DNA, 20 bp, Artificial sequence
  Synthetic oligonucleotide
accaggcaccccagttgccc

SEQ ID NO: 2153 - DNA, 20 bp, Artificial sequence
  Synthetic oligonucleotide
ggatacttccaggagaccca

SEQ ID NO: 2154 - DNA, 20 bp, Artificial sequence
  Synthetic oligonucleotide
ccccggcttacaatcatgtt

SEQ ID NO: 2155 - DNA, 20 bp, Artificial sequence
  Synthetic oligonucleotide
ctaacccccacatcagagct

SEQ ID NO: 2156 - DNA, 20 bp, Artificial sequence
  Synthetic oligonucleotide
cagagggacctctctctttt

SEQ ID NO: 2157 - DNA, 20 bp, Artificial sequence
  Synthetic oligonucleotide
tccaggtaataatatactct

SEQ ID NO: 2158 - DNA, 20 bp, Artificial sequence
  Synthetic oligonucleotide
ctggtttcctcctgagcaca

SEQ ID NO: 2159 - DNA, 20 bp, Artificial sequence
  Synthetic oligonucleotide
ccctgatgatctaccccaga

SEQ ID NO: 2160 - DNA, 20 bp, Artificial sequence
  Synthetic oligonucleotide
agacgcagcccactcggata

SEQ ID NO: 2161 - DNA, 20 bp, Artificial sequence
  Synthetic oligonucleotide
ctgccgctccatccagaggt

SEQ ID NO: 2162 - DNA, 20 bp, Artificial sequence
  Synthetic oligonucleotide
ccagacccggcaaaacactc

SEQ ID NO: 2163 - DNA, 20 bp, Artificial sequence
  Synthetic oligonucleotide
gagccaggtccccttccctc

SEQ ID NO: 2164 - DNA, 20 bp, Artificial sequence
  Synthetic oligonucleotide
ccaaactcacaccagaagcc

SEQ ID NO: 2165 - DNA, 20 bp, Artificial sequence
  Synthetic oligonucleotide
atggtccacctaaatggtcc

SEQ ID NO: 2166 - DNA, 20 bp, Artificial sequence
  Synthetic oligonucleotide
tcctgcaaatcaccagagtc

SEQ ID NO: 2167 - DNA, 20 bp, Artificial sequence
  Synthetic oligonucleotide
cctcatttcccccgcagcat

SEQ ID NO: 2168 - DNA, 20 bp, Artificial sequence
  Synthetic oligonucleotide
gctcccgtaacaaatgaccg

SEQ ID NO: 2169 - DNA, 20 bp, Artificial sequence
  Synthetic oligonucleotide
gcccccccatagcttggcca

SEQ ID NO: 2170 - DNA, 20 bp, Artificial sequence
  Synthetic oligonucleotide
gggtccctgtttactgatcc

SEQ ID NO: 2171 - DNA, 20 bp, Artificial sequence
  Synthetic oligonucleotide
tcagacacccatgccgggcc

SEQ ID NO: 2172 - DNA, 20 bp, Artificial sequence
  Synthetic oligonucleotide
ggctgcccgtattcttcctg

SEQ ID NO: 2173 - DNA, 20 bp, Artificial sequence
  Synthetic oligonucleotide
ccgagagcgcatcccagctc

SEQ ID NO: 2174 - DNA, 20 bp, Artificial sequence
  Synthetic oligonucleotide
gcagattcacctctgtattc

SEQ ID NO: 2175 - DNA, 20 bp, Artificial sequence
  Synthetic oligonucleotide
tccagcggtccacctcctaa

SEQ ID NO: 2176 - DNA, 20 bp, Artificial sequence
  Synthetic oligonucleotide
gtgtccattctcatccactc

SEQ ID NO: 2177 - DNA, 20 bp, Artificial sequence
  Synthetic oligonucleotide
cccctccatacaacagggac

SEQ ID NO: 2178 - DNA, 20 bp, Artificial sequence
  Synthetic oligonucleotide
gagggacctctctcttttaa

SEQ ID NO: 2179 - DNA, 20 bp, Artificial sequence
  Synthetic oligonucleotide
ctgacagtcatatttaacca

SEQ ID NO: 2180 - DNA, 20 bp, Artificial sequence
  Synthetic oligonucleotide
gcttaggaacccaccctccc

SEQ ID NO: 2181 - DNA, 20 bp, Artificial sequence
  Synthetic oligonucleotide
tcagccagatatcaaggcaa

SEQ ID NO: 2182 - DNA, 20 bp, Artificial sequence
  Synthetic oligonucleotide
agcaccagcctaacccctgt

SEQ ID NO: 2183 - DNA, 20 bp, Artificial sequence
  Synthetic oligonucleotide
ctcctgagcacagatcgccg

SEQ ID NO: 2184 - DNA, 20 bp, Artificial sequence
  Synthetic oligonucleotide
ggagagactcctctcacaca

SEQ ID NO: 2185 - DNA, 20 bp, Artificial sequence
  Synthetic oligonucleotide
acggcggcacacactatagc

SEQ ID NO: 2186 - DNA, 20 bp, Artificial sequence
  Synthetic oligonucleotide
tgaccccaccactgaagcca

SEQ ID NO: 2187 - DNA, 20 bp, Artificial sequence
  Synthetic oligonucleotide
ccagcatatattcaatcaac

SEQ ID NO: 2188 - DNA, 20 bp, Artificial sequence
  Synthetic oligonucleotide
agatcctcaactaatcacat

SEQ ID NO: 2189 - DNA, 20 bp, Artificial sequence
  Synthetic oligonucleotide
atgtttcttccctctgacct

SEQ ID NO: 2190 - DNA, 20 bp, Artificial sequence
  Synthetic oligonucleotide
tgtccattctcatccactca

SEQ ID NO: 2191 - DNA, 20 bp, Artificial sequence
  Synthetic oligonucleotide
tcggcataacacatggcccc

SEQ ID NO: 2192 - DNA, 20 bp, Artificial sequence
  Synthetic oligonucleotide
tgttcccccaccctgaatcc

SEQ ID NO: 2193 - DNA, 20 bp, Artificial sequence
  Synthetic oligonucleotide
accctccgacctttactcca

SEQ ID NO: 2194 - DNA, 20 bp, Artificial sequence
  Synthetic oligonucleotide
acgctagtgccaccgtgtcc

SEQ ID NO: 2195 - DNA, 20 bp, Artificial sequence
  Synthetic oligonucleotide
ccccctttttacaaatcttc

SEQ ID NO: 2196 - DNA, 20 bp, Artificial sequence
  Synthetic oligonucleotide
cttacccacatacttgtcca

SEQ ID NO: 2197 - DNA, 20 bp, Artificial sequence
  Synthetic oligonucleotide
atactcttgttaccttgtca

SEQ ID NO: 2198 - DNA, 20 bp, Artificial sequence
  Synthetic oligonucleotide
tcgctcacattccctgggaa

SEQ ID NO: 2199 - DNA, 20 bp, Artificial sequence
  Synthetic oligonucleotide
gacttgtgcccataaggagc

SEQ ID NO: 2200 - DNA, 20 bp, Artificial sequence
  Synthetic oligonucleotide
gacaatgattcaaacatggc

SEQ ID NO: 2201 - DNA, 20 bp, Artificial sequence
  Synthetic oligonucleotide
ggtcagtaaatgctgggttt

SEQ ID NO: 2202 - DNA, 20 bp, Artificial sequence
  Synthetic oligonucleotide
aggcgagctttacactttta

SEQ ID NO: 2203 - DNA, 20 bp, Artificial sequence
  Synthetic oligonucleotide
cggatggacaccacttcctg

SEQ ID NO: 2204 - DNA, 20 bp, Artificial sequence
  Synthetic oligonucleotide
tgtgccctccaccagcaggc

SEQ ID NO: 2205 - DNA, 20 bp, Artificial sequence
  Synthetic oligonucleotide
cctgcaaatcaccagagtcc

SEQ ID NO: 2206 - DNA, 20 bp, Artificial sequence
  Synthetic oligonucleotide
cctagagacatccccaccgc

SEQ ID NO: 2207 - DNA, 20 bp, Artificial sequence
  Synthetic oligonucleotide
cagacgcaccatcacccaac

SEQ ID NO: 2208 - DNA, 20 bp, Artificial sequence
  Synthetic oligonucleotide
cttcctggcacctctcatgt

SEQ ID NO: 2209 - DNA, 20 bp, Artificial sequence
  Synthetic oligonucleotide
agcatcagaatcaataacga

SEQ ID NO: 2210 - DNA, 20 bp, Artificial sequence
  Synthetic oligonucleotide
cgagagcgcatcccagctcc

SEQ ID NO: 2211 - DNA, 20 bp, Artificial sequence
  Synthetic oligonucleotide
agcaagttcccacccaccct

SEQ ID NO: 2212 - DNA, 20 bp, Artificial sequence
  Synthetic oligonucleotide
ctaagaaaactcccttgcca

SEQ ID NO: 2213 - DNA, 20 bp, Artificial sequence
  Synthetic oligonucleotide
ttccctctcatcctatagac

SEQ ID NO: 2214 - DNA, 20 bp, Artificial sequence
  Synthetic oligonucleotide
gggcctttcccacatggaaa

SEQ ID NO: 2215 - DNA, 20 bp, Artificial sequence
  Synthetic oligonucleotide
ttgttgcccacccattccag

SEQ ID NO: 2216 - DNA, 20 bp, Artificial sequence
  Synthetic oligonucleotide
taacccccacatcagagctc

SEQ ID NO: 2217 - DNA, 20 bp, Artificial sequence
  Synthetic oligonucleotide
gaattgtgcttcacaagtca

SEQ ID NO: 2218 - DNA, 20 bp, Artificial sequence
  Synthetic oligonucleotide
cctttgctgcttctaacttc

SEQ ID NO: 2219 - DNA, 20 bp, Artificial sequence
  Synthetic oligonucleotide
cagattcacctctgtattcc

SEQ ID NO: 2220 - DNA, 20 bp, Artificial sequence
  Synthetic oligonucleotide
tgctgtgtcccaccctgagc

SEQ ID NO: 2221 - DNA, 20 bp, Artificial sequence
  Synthetic oligonucleotide
agcaggaccactccctccac

SEQ ID NO: 2222 - DNA, 20 bp, Artificial sequence
  Synthetic oligonucleotide
cgggatcatcctctgccagc

SEQ ID NO: 2223 - DNA, 20 bp, Artificial sequence
  Synthetic oligonucleotide
gaggccaccatcccagcagt

SEQ ID NO: 2224 - DNA, 20 bp, Artificial sequence
  Synthetic oligonucleotide
agcacaggcatctactgacc

SEQ ID NO: 2225 - DNA, 20 bp, Artificial sequence
  Synthetic oligonucleotide
gatgcattccatccagatat

SEQ ID NO: 2226 - DNA, 20 bp, Artificial sequence
  Synthetic oligonucleotide
gggatgtgaaaccagaagcc

SEQ ID NO: 2227 - DNA, 20 bp, Artificial sequence
  Synthetic oligonucleotide
actggagacccaccatctcc

SEQ ID NO: 2228 - DNA, 20 bp, Artificial sequence
  Synthetic oligonucleotide
caggtcagcatcacagacct

SEQ ID NO: 2229 - DNA, 20 bp, Artificial sequence
  Synthetic oligonucleotide
ctgagcccccacattgcacc

SEQ ID NO: 2230 - DNA, 20 bp, Artificial sequence
  Synthetic oligonucleotide
ccaggagacccagccggcgc

SEQ ID NO: 2231 - DNA, 20 bp, Artificial sequence
  Synthetic oligonucleotide
agacccggcaaaacactcct

SEQ ID NO: 2232 - DNA, 20 bp, Artificial sequence
  Synthetic oligonucleotide
gtccgagcaccacagtgccc

SEQ ID NO: 2233 - DNA, 20 bp, Artificial sequence
  Synthetic oligonucleotide
aagggcagcacctcggagtc

SEQ ID NO: 2234 - DNA, 20 bp, Artificial sequence
  Synthetic oligonucleotide
tggatgccccaatctgccca

SEQ ID NO: 2235 - DNA, 20 bp, Artificial sequence
  Synthetic oligonucleotide
gatgatctaccccagaggac

SEQ ID NO: 2236 - DNA, 20 bp, Artificial sequence
  Synthetic oligonucleotide
cccgcagtcacctcccactg

SEQ ID NO: 2237 - DNA, 20 bp, Artificial sequence
  Synthetic oligonucleotide
ctaaatggtccatcccagaa

SEQ ID NO: 2238 - DNA, 20 bp, Artificial sequence
  Synthetic oligonucleotide
gtccctgtcctaatgagctg

SEQ ID NO: 2239 - DNA, 20 bp, Artificial sequence
  Synthetic oligonucleotide
ccagcggtccacctcctaat

SEQ ID NO: 2240 - DNA, 20 bp, Artificial sequence
  Synthetic oligonucleotide
ctcctcgaaccttcacggcc

SEQ ID NO: 2241 - DNA, 20 bp, Artificial sequence
  Synthetic oligonucleotide
cccgtaacaaatgaccgcaa

SEQ ID NO: 2242 - DNA, 20 bp, Artificial sequence
  Synthetic oligonucleotide
catctttccctcactcgcct

SEQ ID NO: 2243 - DNA, 20 bp, Artificial sequence
  Synthetic oligonucleotide
ttcaagcctcgatcaagtaa

SEQ ID NO: 2244 - DNA, 20 bp, Artificial sequence
  Synthetic oligonucleotide
ctgtggccgcccacttctcc

SEQ ID NO: 2245 - DNA, 20 bp, Artificial sequence
  Synthetic oligonucleotide
attgcacccccagattccct

SEQ ID NO: 2246 - DNA, 20 bp, Artificial sequence
  Synthetic oligonucleotide
gacgcagcccactcggataa

SEQ ID NO: 2247 - DNA, 20 bp, Artificial sequence
  Synthetic oligonucleotide
cccggcttacaatcatgttt

SEQ ID NO: 2248 - DNA, 20 bp, Artificial sequence
  Synthetic oligonucleotide
ggttcagctccttgcgggat

SEQ ID NO: 2249 - DNA, 20 bp, Artificial sequence
  Synthetic oligonucleotide
gcttgctgacccaaacttca

SEQ ID NO: 2250 - DNA, 20 bp, Artificial sequence
  Synthetic oligonucleotide
aggccctccacttaatcata

SEQ ID NO: 2251 - DNA, 20 bp, Artificial sequence
  Synthetic oligonucleotide
ggcagcagctccattacctc

SEQ ID NO: 2252 - DNA, 20 bp, Artificial sequence
  Synthetic oligonucleotide
gccacagtctccacagcaga

SEQ ID NO: 2253 - DNA, 20 bp, Artificial sequence
  Synthetic oligonucleotide
ccttcacggcccctaaacca

SEQ ID NO: 2254 - DNA, 20 bp, Artificial sequence
  Synthetic oligonucleotide
cgagggtcttccatgagcgc

SEQ ID NO: 2255 - DNA, 20 bp, Artificial sequence
  Synthetic oligonucleotide
ctcactcgcctttttagagc

SEQ ID NO: 2256 - DNA, 20 bp, Artificial sequence
  Synthetic oligonucleotide
ctagagacatccccaccgca

SEQ ID NO: 2257 - DNA, 20 bp, Artificial sequence
  Synthetic oligonucleotide
gttcagctccttgcgggatc

SEQ ID NO: 2258 - DNA, 20 bp, Artificial sequence
  Synthetic oligonucleotide
tgaatccccccacccttggc

SEQ ID NO: 2259 - DNA, 20 bp, Artificial sequence
  Synthetic oligonucleotide
gctgcggaccacccacctct

SEQ ID NO: 2260 - DNA, 20 bp, Artificial sequence
  Synthetic oligonucleotide
gaccgtgtttctacataagc

SEQ ID NO: 2261 - DNA, 20 bp, Artificial sequence
  Synthetic oligonucleotide
ccagtgccccatcggtgcca

SEQ ID NO: 2262 - DNA, 20 bp, Artificial sequence
  Synthetic oligonucleotide
ttcttagcatttactgagac

SEQ ID NO: 2263 - DNA, 20 bp, Artificial sequence
  Synthetic oligonucleotide
ccgcccacttctccgagcac

SEQ ID NO: 2264 - DNA, 20 bp, Artificial sequence
  Synthetic oligonucleotide
gctagtgccaccgtgtcctc

SEQ ID NO: 2265 - DNA, 20 bp, Artificial sequence
  Synthetic oligonucleotide
ggatgtgaaaccagaagccc

SEQ ID NO: 2266 - DNA, 20 bp, Artificial sequence
  Synthetic oligonucleotide
tgagcccccacattgcacct

SEQ ID NO: 2267 - DNA, 20 bp, Artificial sequence
  Synthetic oligonucleotide
cccacatacttgtccagcca

SEQ ID NO: 2268 - DNA, 20 bp, Artificial sequence
  Synthetic oligonucleotide
ggatgccccaatctgcccac

SEQ ID NO: 2269 - DNA, 20 bp, Artificial sequence
  Synthetic oligonucleotide
atgaacaggttccgcagcgg

SEQ ID NO: 2270 - DNA, 20 bp, Artificial sequence
  Synthetic oligonucleotide
gccctccacttaatcatatc

SEQ ID NO: 2271 - DNA, 20 bp, Artificial sequence
  Synthetic oligonucleotide
ctgttgtgttggctgagggc

SEQ ID NO: 2272 - DNA, 20 bp, Artificial sequence
  Synthetic oligonucleotide
cagcatatattcaatcaact

SEQ ID NO: 2273 - DNA, 20 bp, Artificial sequence
  Synthetic oligonucleotide
ctggagacccaccatctccc

SEQ ID NO: 2274 - DNA, 20 bp, Artificial sequence
  Synthetic oligonucleotide
cgagctttacacttttagaa

SEQ ID NO: 2275 - DNA, 20 bp, Artificial sequence
  Synthetic oligonucleotide
gttgaagcccccaccgctga

SEQ ID NO: 2276 - DNA, 20 bp, Artificial sequence
  Synthetic oligonucleotide
gaaaactcccttgccaggca

SEQ ID NO: 2277 - DNA, 20 bp, Artificial sequence
  Synthetic oligonucleotide
gccacgctgtctaatcagct

SEQ ID NO: 2278 - DNA, 20 bp, Artificial sequence
  Synthetic oligonucleotide
gtggctccaacctgttctca

SEQ ID NO: 2279 - DNA, 20 bp, Artificial sequence
  Synthetic oligonucleotide
aacccccacatcagagctct

SEQ ID NO: 2280 - DNA, 20 bp, Artificial sequence
  Synthetic oligonucleotide
taaatggtccatcccagaag

SEQ ID NO: 2281 - DNA, 20 bp, Artificial sequence
  Synthetic oligonucleotide
acacatggccccatacaggc

SEQ ID NO: 2282 - DNA, 20 bp, Artificial sequence
  Synthetic oligonucleotide
gcaggaccactccctccacc

SEQ ID NO: 2283 - DNA, 20 bp, Artificial sequence
  Synthetic oligonucleotide
ctgcaaatcaccagagtccc

SEQ ID NO: 2284 - DNA, 20 bp, Artificial sequence
  Synthetic oligonucleotide
ctttgctgcttctaacttcc

SEQ ID NO: 2285 - DNA, 20 bp, Artificial sequence
  Synthetic oligonucleotide
cccctttttacaaatcttca

SEQ ID NO: 2286 - DNA, 20 bp, Artificial sequence
  Synthetic oligonucleotide
cagcggtccacctcctaata

SEQ ID NO: 2287 - DNA, 20 bp, Artificial sequence
  Synthetic oligonucleotide
tccctctcatcctatagaca

SEQ ID NO: 2288 - DNA, 20 bp, Artificial sequence
  Synthetic oligonucleotide
gctgacccaaacttcaagcc

SEQ ID NO: 2289 - DNA, 20 bp, Artificial sequence
  Synthetic oligonucleotide
gcattccatccagatatggc

SEQ ID NO: 2290 - DNA, 20 bp, Artificial sequence
  Synthetic oligonucleotide
ctggattcctgttccaggac

SEQ ID NO: 2291 - DNA, 20 bp, Artificial sequence
  Synthetic oligonucleotide
cggcaaaacactcctggatt

SEQ ID NO: 2292 - DNA, 20 bp, Artificial sequence
  Synthetic oligonucleotide
atggacaccacttcctgccc

SEQ ID NO: 2293 - DNA, 20 bp, Artificial sequence
  Synthetic oligonucleotide
gctgtgtcccaccctgagct

SEQ ID NO: 2294 - DNA, 20 bp, Artificial sequence
  Synthetic oligonucleotide
gggacctctctcttttaatc

SEQ ID NO: 2295 - DNA, 20 bp, Artificial sequence
  Synthetic oligonucleotide
ttcctggcacctctcatgtc

SEQ ID NO: 2296 - DNA, 20 bp, Artificial sequence
  Synthetic oligonucleotide
gagagactcctctcacacac

SEQ ID NO: 2297 - DNA, 20 bp, Artificial sequence
  Synthetic oligonucleotide
aggagcagtctcagctgcca

SEQ ID NO: 2298 - DNA, 20 bp, Artificial sequence
  Synthetic oligonucleotide
ggcaacacaggcaaaccgac

SEQ ID NO: 2299 - DNA, 20 bp, Artificial sequence
  Synthetic oligonucleotide
cagcagacactcaacttgac

SEQ ID NO: 2300 - DNA, 20 bp, Artificial sequence
  Synthetic oligonucleotide
cgctcacattccctgggaac

SEQ ID NO: 2301 - DNA, 20 bp, Artificial sequence
  Synthetic oligonucleotide
gggtttagaaaatgaggctt

SEQ ID NO: 2302 - DNA, 20 bp, Artificial sequence
  Synthetic oligonucleotide
ctgcccgtattcttcctgaa

SEQ ID NO: 2303 - DNA, 20 bp, Artificial sequence
  Synthetic oligonucleotide
gcagcagctccattacctct

SEQ ID NO: 2304 - DNA, 20 bp, Artificial sequence
  Synthetic oligonucleotide
aaggcaacagcaacagtgcc

SEQ ID NO: 2305 - DNA, 20 bp, Artificial sequence
  Synthetic oligonucleotide
taagctctgtccagcaggcc

SEQ ID NO: 2306 - DNA, 20 bp, Artificial sequence
  Synthetic oligonucleotide
gttgcccacccattccagca

SEQ ID NO: 2307 - DNA, 20 bp, Artificial sequence
  Synthetic oligonucleotide
atcactctgcttcaagggct

SEQ ID NO: 2308 - DNA, 20 bp, Artificial sequence
  Synthetic oligonucleotide
gcacaggcatctactgaccc

SEQ ID NO: 2309 - DNA, 20 bp, Artificial sequence
  Synthetic oligonucleotide
tctgtattccacacacattt

SEQ ID NO: 2310 - DNA, 20 bp, Artificial sequence
  Synthetic oligonucleotide
ccctccgacctttactccag

SEQ ID NO: 2311 - DNA, 20 bp, Artificial sequence
  Synthetic oligonucleotide
ctggccactcctcctaggcg

SEQ ID NO: 2312 - DNA, 20 bp, Artificial sequence
  Synthetic oligonucleotide
cccgcaggcatcctgggcct

SEQ ID NO: 2313 - DNA, 20 bp, Artificial sequence
  Synthetic oligonucleotide
caccagcctaacccctgttc

SEQ ID NO: 2314 - DNA, 20 bp, Artificial sequence
  Synthetic oligonucleotide
ctgtcccgccctccatggca

SEQ ID NO: 2315 - DNA, 20 bp, Artificial sequence
  Synthetic oligonucleotide
agacgcaccatcacccaaca

SEQ ID NO: 2316 - DNA, 20 bp, Artificial sequence
  Synthetic oligonucleotide
gtcactctgtcaatttgtct

SEQ ID NO: 2317 - DNA, 20 bp, Artificial sequence
  Synthetic oligonucleotide
cgtgaagtccctcccgggac

SEQ ID NO: 2318 - DNA, 20 bp, Artificial sequence
  Synthetic oligonucleotide
tgctgtggttacaaatgacc

SEQ ID NO: 2319 - DNA, 20 bp, Artificial sequence
  Synthetic oligonucleotide
gcaagttcccacccaccctc

SEQ ID NO: 2320 - DNA, 20 bp, Artificial sequence
  Synthetic oligonucleotide
ccgcagtcacctcccactgc

SEQ ID NO: 2321 - DNA, 20 bp, Artificial sequence
  Synthetic oligonucleotide
atgatctaccccagaggacc

SEQ ID NO: 2322 - DNA, 20 bp, Artificial sequence
  Synthetic oligonucleotide
gaccgcaaacttagcagcta

SEQ ID NO: 2323 - DNA, 20 bp, Artificial sequence
  Synthetic oligonucleotide
gagggcagctcccttcgcct

SEQ ID NO: 2324 - DNA, 20 bp, Artificial sequence
  Synthetic oligonucleotide
aggtcagcatcacagacctc

SEQ ID NO: 2325 - DNA, 20 bp, Artificial sequence
  Synthetic oligonucleotide
cggcggcacacactatagcc

SEQ ID NO: 2326 - DNA, 20 bp, Artificial sequence
  Synthetic oligonucleotide
tcagaatcaataacgatctg

SEQ ID NO: 2327 - DNA, 20 bp, Artificial sequence
  Synthetic oligonucleotide
cttccaggcactcgcaggcc

SEQ ID NO: 2328 - DNA, 20 bp, Artificial sequence
  Synthetic oligonucleotide
gtccattctcatccactcat

SEQ ID NO: 2329 - DNA, 20 bp, Artificial sequence
  Synthetic oligonucleotide
ggataatcgccctttgatta

SEQ ID NO: 2330 - DNA, 20 bp, Artificial sequence
  Synthetic oligonucleotide
ccgtgtttctacataagcca

SEQ ID NO: 2331 - DNA, 20 bp, Artificial sequence
  Synthetic oligonucleotide
acttagcagctaaaacgaca

SEQ ID NO: 2332 - DNA, 20 bp, Artificial sequence
  Synthetic oligonucleotide
ggacaccacttcctgcccaa

SEQ ID NO: 2333 - DNA, 20 bp, Artificial sequence
  Synthetic oligonucleotide
tagagacatccccaccgcaa

SEQ ID NO: 2334 - DNA, 20 bp, Artificial sequence
  Synthetic oligonucleotide
acccccacatcagagctcta

SEQ ID NO: 2335 - DNA, 20 bp, Artificial sequence
  Synthetic oligonucleotide
caggtgcctctaacatagac

SEQ ID NO: 2336 - DNA, 20 bp, Artificial sequence
  Synthetic oligonucleotide
ggcctgggacccatctggac

SEQ ID NO: 2337 - DNA, 20 bp, Artificial sequence
  Synthetic oligonucleotide
agcatatattcaatcaactt

SEQ ID NO: 2338 - DNA, 20 bp, Artificial sequence
  Synthetic oligonucleotide
gtcagcatcacagacctcct

SEQ ID NO: 2339 - DNA, 20 bp, Artificial sequence
  Synthetic oligonucleotide
aaatggtccatcccagaagg

SEQ ID NO: 2340 - DNA, 20 bp, Artificial sequence
  Synthetic oligonucleotide
cctcagtgcttactgagcac

SEQ ID NO: 2341 - DNA, 20 bp, Artificial sequence
  Synthetic oligonucleotide
ttcctgttccaggactccaa

SEQ ID NO: 2342 - DNA, 20 bp, Artificial sequence
  Synthetic oligonucleotide
gaggctttgctttaaaaggt

SEQ ID NO: 2343 - DNA, 20 bp, Artificial sequence
  Synthetic oligonucleotide
ccacgctgtctaatcagctc

SEQ ID NO: 2344 - DNA, 20 bp, Artificial sequence
  Synthetic oligonucleotide
ggacctctctcttttaatcc

SEQ ID NO: 2345 - DNA, 20 bp, Artificial sequence
  Synthetic oligonucleotide
actcgcctttttagagccct

SEQ ID NO: 2346 - DNA, 20 bp, Artificial sequence
  Synthetic oligonucleotide
gtggagtgtccctctgcacc

SEQ ID NO: 2347 - DNA, 20 bp, Artificial sequence
  Synthetic oligonucleotide
cagatccaaaacagaggcca

SEQ ID NO: 2348 - DNA, 20 bp, Artificial sequence
  Synthetic oligonucleotide
ggcattgtggcaaacaggtc

SEQ ID NO: 2349 - DNA, 20 bp, Artificial sequence
  Synthetic oligonucleotide
cctgcagacccaacttccac

SEQ ID NO: 2350 - DNA, 20 bp, Artificial sequence
  Synthetic oligonucleotide
cccacccaccctcatcgcgg

SEQ ID NO: 2351 - DNA, 20 bp, Artificial sequence
  Synthetic oligonucleotide
tcactctgcttcaagggctt

SEQ ID NO: 2352 - DNA, 20 bp, Artificial sequence
  Synthetic oligonucleotide
agagactcctctcacacacc

SEQ ID NO: 2353 - DNA, 20 bp, Artificial sequence
  Synthetic oligonucleotide
tgacccaaacttcaagccac

SEQ ID NO: 2354 - DNA, 20 bp, Artificial sequence
  Synthetic oligonucleotide
cttcacggcccctaaaccac

SEQ ID NO: 2355 - DNA, 20 bp, Artificial sequence
  Synthetic oligonucleotide
ttaaaaggaactctaccttc

SEQ ID NO: 2356 - DNA, 20 bp, Artificial sequence
  Synthetic oligonucleotide
agcagacactcaacttgacc

SEQ ID NO: 2357 - DNA, 20 bp, Artificial sequence
  Synthetic oligonucleotide
cacatggccccatacaggca

SEQ ID NO: 2358 - DNA, 20 bp, Artificial sequence
  Synthetic oligonucleotide
gcaaatcaccagagtcccca

SEQ ID NO: 2359 - DNA, 20 bp, Artificial sequence
  Synthetic oligonucleotide
atctactgacccctctggaa

SEQ ID NO: 2360 - DNA, 20 bp, Artificial sequence
  Synthetic oligonucleotide
agcggtccacctcctaatac

SEQ ID NO: 2361 - DNA, 20 bp, Artificial sequence
  Synthetic oligonucleotide
cgcagtcacctcccactgcc

SEQ ID NO: 2362 - DNA, 20 bp, Artificial sequence
  Synthetic oligonucleotide
tgcacagatcttcatagcaa

SEQ ID NO: 2363 - DNA, 20 bp, Artificial sequence
  Synthetic oligonucleotide
ggtctgctcacctcacttgc

SEQ ID NO: 2364 - DNA, 20 bp, Artificial sequence
  Synthetic oligonucleotide
ggaccaaccccagatggtcc

SEQ ID NO: 2365 - DNA, 20 bp, Artificial sequence
  Synthetic oligonucleotide
agcagctccattacctctgc

SEQ ID NO: 2366 - DNA, 20 bp, Artificial sequence
  Synthetic oligonucleotide
ttttacaaatcttcatggtc

SEQ ID NO: 2367 - DNA, 20 bp, Artificial sequence
  Synthetic oligonucleotide
gggagatgtctctccaagct

SEQ ID NO: 2368 - DNA, 20 bp, Artificial sequence
  Synthetic oligonucleotide
ggcctcagcaccagatgcct

SEQ ID NO: 2369 - DNA, 20 bp, Artificial sequence
  Synthetic oligonucleotide
tggccactcctcctaggcgg

SEQ ID NO: 2370 - DNA, 20 bp, Artificial sequence
  Synthetic oligonucleotide
gggtccgtcacacccagcag

SEQ ID NO: 2371 - DNA, 20 bp, Artificial sequence
  Synthetic oligonucleotide
cctctcatcctatagacacc

SEQ ID NO: 2372 - DNA, 20 bp, Artificial sequence
  Synthetic oligonucleotide
tcctggcacctctcatgtcc

SEQ ID NO: 2373 - DNA, 20 bp, Artificial sequence
  Synthetic oligonucleotide
gctttacacttttagaagaa

SEQ ID NO: 2374 - DNA, 20 bp, Artificial sequence
  Synthetic oligonucleotide
gccaccgtgtcctcacacgc

SEQ ID NO: 2375 - DNA, 20 bp, Artificial sequence
  Synthetic oligonucleotide
tgggaacgaacccacagccc

SEQ ID NO: 2376 - DNA, 20 bp, Artificial sequence
  Synthetic oligonucleotide
cctgggttccacacctgacc

SEQ ID NO: 2377 - DNA, 20 bp, Artificial sequence
  Synthetic oligonucleotide
gcgctgctccacctgcccaa

SEQ ID NO: 2378 - DNA, 20 bp, Artificial sequence
  Synthetic oligonucleotide
gcccacttctccgagcacca

SEQ ID NO: 2379 - DNA, 20 bp, Artificial sequence
  Synthetic oligonucleotide
atgacatgcatttcactcac

SEQ ID NO: 2380 - DNA, 20 bp, Artificial sequence
  Synthetic oligonucleotide
gctactgcaatgaccggcca

SEQ ID NO: 2381 - DNA, 20 bp, Artificial sequence
  Synthetic oligonucleotide
taattcaaattcaactgctc

SEQ ID NO: 2382 - DNA, 20 bp, Artificial sequence
  Synthetic oligonucleotide
ggaaaggtcttcacaggcca

SEQ ID NO: 2383 - DNA, 20 bp, Artificial sequence
  Synthetic oligonucleotide
ccattctcatccactcatca

SEQ ID NO: 2384 - DNA, 20 bp, Artificial sequence
  Synthetic oligonucleotide
accagcctaacccctgttcc

SEQ ID NO: 2385 - DNA, 20 bp, Artificial sequence
  Synthetic oligonucleotide
gcccgtattcttcctgaaga

SEQ ID NO: 2386 - DNA, 20 bp, Artificial sequence
  Synthetic oligonucleotide
ccctccacttaatcatatct

SEQ ID NO: 2387 - DNA, 20 bp, Artificial sequence
  Synthetic oligonucleotide
gccatgccagactcacccaa

SEQ ID NO: 2388 - DNA, 20 bp, Artificial sequence
  Synthetic oligonucleotide
gcccagttctccttctcaaa

SEQ ID NO: 2389 - DNA, 20 bp, Artificial sequence
  Synthetic oligonucleotide
tcatgctcagaaaatgacca

SEQ ID NO: 2390 - DNA, 20 bp, Artificial sequence
  Synthetic oligonucleotide
cattccatccagatatggct

SEQ ID NO: 2391 - DNA, 20 bp, Artificial sequence
  Synthetic oligonucleotide
cgcaccatcacccaacagca

SEQ ID NO: 2392 - DNA, 20 bp, Artificial sequence
  Synthetic oligonucleotide
atcctgggcctctccagact

SEQ ID NO: 2393 - DNA, 20 bp, Artificial sequence
  Synthetic oligonucleotide
tggttgggtctccctgcccc

SEQ ID NO: 2394 - DNA, 20 bp, Artificial sequence
  Synthetic oligonucleotide
gctgttgtccccagcaggcc

SEQ ID NO: 2395 - DNA, 20 bp, Artificial sequence
  Synthetic oligonucleotide
tgctgcttctaacttccaga

SEQ ID NO: 2396 - DNA, 20 bp, Artificial sequence
  Synthetic oligonucleotide
gggagcccatttcccaagtt

SEQ ID NO: 2397 - DNA, 20 bp, Artificial sequence
  Synthetic oligonucleotide
ttgccaggcacccataggtc

SEQ ID NO: 2398 - DNA, 20 bp, Artificial sequence
  Synthetic oligonucleotide
agagcagcaacatggagccc

SEQ ID NO: 2399 - DNA, 20 bp, Artificial sequence
  Synthetic oligonucleotide
tggagacccaccatctcccc

SEQ ID NO: 2400 - DNA, 20 bp, Artificial sequence
  Synthetic oligonucleotide
gaccacaaattcaattgcta

SEQ ID NO: 2401 - DNA, 20 bp, Artificial sequence
  Synthetic oligonucleotide
gaatccccccacccttggct

SEQ ID NO: 2402 - DNA, 20 bp, Artificial sequence
  Synthetic oligonucleotide
cctccgacctttactccagg

SEQ ID NO: 2403 - DNA, 20 bp, Artificial sequence
  Synthetic oligonucleotide
ggcggcacacactatagcct

SEQ ID NO: 2404 - DNA, 20 bp, Artificial sequence
  Synthetic oligonucleotide
gagatgctctcaccaggagc

SEQ ID NO: 2405 - DNA, 20 bp, Artificial sequence
  Synthetic oligonucleotide
gcacttccaccttacccaga

SEQ ID NO: 2406 - DNA, 20 bp, Artificial sequence
  Synthetic oligonucleotide
ccaacttccactttgcaaaa

SEQ ID NO: 2407 - DNA, 20 bp, Artificial sequence
  Synthetic oligonucleotide
aaaatgaccaactcactggc

SEQ ID NO: 2408 - DNA, 20 bp, Artificial sequence
  Synthetic oligonucleotide
acaagagaacatctgtgccg

SEQ ID NO: 2409 - DNA, 20 bp, Artificial sequence
  Synthetic oligonucleotide
agcccagtcacccgtgagca

SEQ ID NO: 2410 - DNA, 20 bp, Artificial sequence
  Synthetic oligonucleotide
catcactgtcccaatcaccc

SEQ ID NO: 2411 - DNA, 20 bp, Artificial sequence
  Synthetic oligonucleotide
acacgcccaggcaaaccgcc

SEQ ID NO: 2412 - DNA, 20 bp, Artificial sequence
  Synthetic oligonucleotide
cactaggcctccatgcaccc

SEQ ID NO: 2413 - DNA, 20 bp, Artificial sequence
  Synthetic oligonucleotide
cgacctttactccaggcctc

SEQ ID NO: 2414 - DNA, 20 bp, Artificial sequence
  Synthetic oligonucleotide
cagacgcatccatttcctcc

SEQ ID NO: 2415 - DNA, 20 bp, Artificial sequence
  Synthetic oligonucleotide
tgggacccagtcatgaacta

SEQ ID NO: 2416 - DNA, 20 bp, Artificial sequence
  Synthetic oligonucleotide
gggttctgccctcttctgac

SEQ ID NO: 2417 - DNA, 20 bp, Artificial sequence
  Synthetic oligonucleotide
cccacacgcaacaaaggcac

SEQ ID NO: 2418 - DNA, 20 bp, Artificial sequence
  Synthetic oligonucleotide
ccataggtcaaaaagggccc

SEQ ID NO: 2419 - DNA, 20 bp, Artificial sequence
  Synthetic oligonucleotide
agcgaggccacccatgtgaa

SEQ ID NO: 2420 - DNA, 20 bp, Artificial sequence
  Synthetic oligonucleotide
atcttcatagcaacccatgc

SEQ ID NO: 2421 - DNA, 20 bp, Artificial sequence
  Synthetic oligonucleotide
cacaagtgttttaagcacac

SEQ ID NO: 2422 - DNA, 20 bp, Artificial sequence
  Synthetic oligonucleotide
tgcactgaaccacctggtgc

SEQ ID NO: 2423 - DNA, 20 bp, Artificial sequence
  Synthetic oligonucleotide
ggtccaccccagacgatcca

SEQ ID NO: 2424 - DNA, 20 bp, Artificial sequence
  Synthetic oligonucleotide
caggaggcccttcaagctcc

SEQ ID NO: 2425 - DNA, 20 bp, Artificial sequence
  Synthetic oligonucleotide
tgtggtccccctcgccacgc

SEQ ID NO: 2426 - DNA, 20 bp, Artificial sequence
  Synthetic oligonucleotide
gcagctgactctcccgcccc

SEQ ID NO: 2427 - DNA, 20 bp, Artificial sequence
  Synthetic oligonucleotide
ctggagtactctccacagac

SEQ ID NO: 2428 - DNA, 20 bp, Artificial sequence
  Synthetic oligonucleotide
ccacttgctccactgtgcga

SEQ ID NO: 2429 - DNA, 20 bp, Artificial sequence
  Synthetic oligonucleotide
gaggcataaacacacttaca

SEQ ID NO: 2430 - DNA, 20 bp, Artificial sequence
  Synthetic oligonucleotide
tcctgtgtccacacctgcgg

SEQ ID NO: 2431 - DNA, 20 bp, Artificial sequence
  Synthetic oligonucleotide
ctcacgggactccatcatta

SEQ ID NO: 2432 - DNA, 20 bp, Artificial sequence
  Synthetic oligonucleotide
agactcacccaaccctacca

SEQ ID NO: 2433 - DNA, 20 bp, Artificial sequence
  Synthetic oligonucleotide
gccggacaccaggcctgcaa

SEQ ID NO: 2434 - DNA, 20 bp, Artificial sequence
  Synthetic oligonucleotide
tttggacaccatcccgggcc

SEQ ID NO: 2435 - DNA, 20 bp, Artificial sequence
  Synthetic oligonucleotide
ccaccgcaaccccttctgct

SEQ ID NO: 2436 - DNA, 20 bp, Artificial sequence
  Synthetic oligonucleotide
tctccacccacagaatagga

SEQ ID NO: 2437 - DNA, 20 bp, Artificial sequence
  Synthetic oligonucleotide
gccctgccccagacgcaccg

SEQ ID NO: 2438 - DNA, 20 bp, Artificial sequence
  Synthetic oligonucleotide
acatcgccattcccagagtc

SEQ ID NO: 2439 - DNA, 20 bp, Artificial sequence
  Synthetic oligonucleotide
ccacagattataacccacag

SEQ ID NO: 2440 - DNA, 20 bp, Artificial sequence
  Synthetic oligonucleotide
ccccagcacatcctggcctt

SEQ ID NO: 2441 - DNA, 20 bp, Artificial sequence
  Synthetic oligonucleotide
gaccagaccccagaatctcc

SEQ ID NO: 2442 - DNA, 20 bp, Artificial sequence
  Synthetic oligonucleotide
tgaaaacgatccattttccc

SEQ ID NO: 2443 - DNA, 20 bp, Artificial sequence
  Synthetic oligonucleotide
ccatggtgcttcctagggca

SEQ ID NO: 2444 - DNA, 20 bp, Artificial sequence
  Synthetic oligonucleotide
aggcggtacatccacgggct

SEQ ID NO: 2445 - DNA, 20 bp, Artificial sequence
  Synthetic oligonucleotide
atggatacagtccctaggac

SEQ ID NO: 2446 - DNA, 20 bp, Artificial sequence
  Synthetic oligonucleotide
tctgaagattcctccccgca

SEQ ID NO: 2447 - DNA, 20 bp, Artificial sequence
  Synthetic oligonucleotide
ccatcgccccacactccact

SEQ ID NO: 2448 - DNA, 20 bp, Artificial sequence
  Synthetic oligonucleotide
gtggctctcccttgcagaat

SEQ ID NO: 2449 - DNA, 20 bp, Artificial sequence
  Synthetic oligonucleotide
cgtgtcctcacacgctcctc

SEQ ID NO: 2450 - DNA, 20 bp, Artificial sequence
  Synthetic oligonucleotide
cgggaaagccacacacaact

SEQ ID NO: 2451 - DNA, 20 bp, Artificial sequence
  Synthetic oligonucleotide
gctgtgagcctcacctcccc

SEQ ID NO: 2452 - DNA, 20 bp, Artificial sequence
  Synthetic oligonucleotide
ggtacatcccacatctgcgg

SEQ ID NO: 2453 - DNA, 20 bp, Artificial sequence
  Synthetic oligonucleotide
cctgatgccctcccccgagc

SEQ ID NO: 2454 - DNA, 20 bp, Artificial sequence
  Synthetic oligonucleotide
tcccccgacatacacagcat

SEQ ID NO: 2455 - DNA, 20 bp, Artificial sequence
  Synthetic oligonucleotide
gcacacaacccatgtgccca

SEQ ID NO: 2456 - DNA, 20 bp, Artificial sequence
  Synthetic oligonucleotide
catctcccgatatagcccta

SEQ ID NO: 2457 - DNA, 20 bp, Artificial sequence
  Synthetic oligonucleotide
ctgtccggagaatccaggcc

SEQ ID NO: 2458 - DNA, 20 bp, Artificial sequence
  Synthetic oligonucleotide
cctaaaccaccactgcccct

SEQ ID NO: 2459 - DNA, 20 bp, Artificial sequence
  Synthetic oligonucleotide
cggagagtcctcccagccct

SEQ ID NO: 2460 - DNA, 20 bp, Artificial sequence
  Synthetic oligonucleotide
ctgccttgccacacaaaaca

SEQ ID NO: 2461 - DNA, 20 bp, Artificial sequence
  Synthetic oligonucleotide
tcgacacacaacatacacaa

SEQ ID NO: 2462 - DNA, 20 bp, Artificial sequence
  Synthetic oligonucleotide
cccagacccctcaccaaaca

SEQ ID NO: 2463 - DNA, 20 bp, Artificial sequence
  Synthetic oligonucleotide
accagacaccagcccaagca

SEQ ID NO: 2464 - DNA, 20 bp, Artificial sequence
  Synthetic oligonucleotide
gctgccgttttcaagaatta

SEQ ID NO: 2465 - DNA, 20 bp, Artificial sequence
  Synthetic oligonucleotide
ccagagtgcagaacagcagc

SEQ ID NO: 2466 - DNA, 20 bp, Artificial sequence
  Synthetic oligonucleotide
gaatcctcacccttagccct

SEQ ID NO: 2467 - DNA, 20 bp, Artificial sequence
  Synthetic oligonucleotide
ccaagagaccccacctggcc

SEQ ID NO: 2468 - DNA, 20 bp, Artificial sequence
  Synthetic oligonucleotide
aaccagtgagtcactacgaa

SEQ ID NO: 2469 - DNA, 20 bp, Artificial sequence
  Synthetic oligonucleotide
aacaagggctctcacacctc

SEQ ID NO: 2470 - DNA, 20 bp, Artificial sequence
  Synthetic oligonucleotide
gcctcctgaaatctgggctt

SEQ ID NO: 2471 - DNA, 20 bp, Artificial sequence
  Synthetic oligonucleotide
tgtcaccccaccagcagcat

SEQ ID NO: 2472 - DNA, 20 bp, Artificial sequence
  Synthetic oligonucleotide
caggtgccttcctttgccgt

SEQ ID NO: 2473 - DNA, 20 bp, Artificial sequence
  Synthetic oligonucleotide
tccgtggaccttctgggtcc

SEQ ID NO: 2474 - DNA, 20 bp, Artificial sequence
  Synthetic oligonucleotide
tcagcgaacttaattatatc

SEQ ID NO: 2475 - DNA, 20 bp, Artificial sequence
  Synthetic oligonucleotide
gttgaccccaccccagaggc

SEQ ID NO: 2476 - DNA, 20 bp, Artificial sequence
  Synthetic oligonucleotide
ctctcatcctatagacacca

SEQ ID NO: 2477 - DNA, 20 bp, Artificial sequence
  Synthetic oligonucleotide
aggtaagtgtaaaatggtcc

SEQ ID NO: 2478 - DNA, 20 bp, Artificial sequence
  Synthetic oligonucleotide
gtgttgatcatctccaggac

SEQ ID NO: 2479 - DNA, 20 bp, Artificial sequence
  Synthetic oligonucleotide
ctaatcagctcccaatccct

SEQ ID NO: 2480 - DNA, 20 bp, Artificial sequence
  Synthetic oligonucleotide
ggagctgccagcaatagcaa

SEQ ID NO: 2481 - DNA, 20 bp, Artificial sequence
  Synthetic oligonucleotide
cagatggtccaccctggaca

SEQ ID NO: 2482 - DNA, 20 bp, Artificial sequence
  Synthetic oligonucleotide
ccttgcaaatatcccaggtt

SEQ ID NO: 2483 - DNA, 20 bp, Artificial sequence
  Synthetic oligonucleotide
gtagagtcccagcacctgcc

SEQ ID NO: 2484 - DNA, 20 bp, Artificial sequence
  Synthetic oligonucleotide
agtcttgaaaccatggtcct

SEQ ID NO: 2485 - DNA, 20 bp, Artificial sequence
  Synthetic oligonucleotide
caccagcgcacacctgccac

SEQ ID NO: 2486 - DNA, 20 bp, Artificial sequence
  Synthetic oligonucleotide
tgcacagctcccatggatga

SEQ ID NO: 2487 - DNA, 20 bp, Artificial sequence
  Synthetic oligonucleotide
ggcccaagcacttcacaccc

SEQ ID NO: 2488 - DNA, 20 bp, Artificial sequence
  Synthetic oligonucleotide
gggcctggtttccctattta

SEQ ID NO: 2489 - DNA, 20 bp, Artificial sequence
  Synthetic oligonucleotide
gtccacggcaccctctcctc

SEQ ID NO: 2490 - DNA, 20 bp, Artificial sequence
  Synthetic oligonucleotide
ggcctcagccttcactcaca

SEQ ID NO: 2491 - DNA, 20 bp, Artificial sequence
  Synthetic oligonucleotide
ccactcctgactcttggttc

SEQ ID NO: 2492 - DNA, 20 bp, Artificial sequence
  Synthetic oligonucleotide
ccctgatgaaacttcagccc

SEQ ID NO: 2493 - DNA, 20 bp, Artificial sequence
  Synthetic oligonucleotide
gtgcctccccccacggcagc

SEQ ID NO: 2494 - DNA, 20 bp, Artificial sequence
  Synthetic oligonucleotide
caaggcagcactcactctac

SEQ ID NO: 2495 - DNA, 20 bp, Artificial sequence
  Synthetic oligonucleotide
ccattttaaccctctttgcc

SEQ ID NO: 2496 - DNA, 20 bp, Artificial sequence
  Synthetic oligonucleotide
atctgaagccccaaactagc

SEQ ID NO: 2497 - DNA, 20 bp, Artificial sequence
  Synthetic oligonucleotide
aggtgccgaaccttaaggac

SEQ ID NO: 2498 - DNA, 20 bp, Artificial sequence
  Synthetic oligonucleotide
acactatgccactaaggaca

SEQ ID NO: 2499 - DNA, 20 bp, Artificial sequence
  Synthetic oligonucleotide
ggctcgctgtcaacacacga

SEQ ID NO: 2500 - DNA, 20 bp, Artificial sequence
  Synthetic oligonucleotide
ccaagggacccactgaggct

SEQ ID NO: 2501 - DNA, 20 bp, Artificial sequence
  Synthetic oligonucleotide
tcttggctcacccagatcat

SEQ ID NO: 2502 - DNA, 20 bp, Artificial sequence
  Synthetic oligonucleotide
ccctggatgctcaacagccg

SEQ ID NO: 2503 - DNA, 20 bp, Artificial sequence
  Synthetic oligonucleotide
cggaacacactttcactctc

SEQ ID NO: 2504 - DNA, 20 bp, Artificial sequence
  Synthetic oligonucleotide
tcacagccccagccttcgcc

SEQ ID NO: 2505 - DNA, 20 bp, Artificial sequence
  Synthetic oligonucleotide
cccttactcatcagtggccg

SEQ ID NO: 2506 - DNA, 20 bp, Artificial sequence
  Synthetic oligonucleotide
tcccagacacactcagggcc

SEQ ID NO: 2507 - DNA, 20 bp, Artificial sequence
  Synthetic oligonucleotide
cacgcagaaactctgggctc

SEQ ID NO: 2508 - DNA, 20 bp, Artificial sequence
  Synthetic oligonucleotide
caggaatacagcattacaat

SEQ ID NO: 2509 - DNA, 20 bp, Artificial sequence
  Synthetic oligonucleotide
caggtaagcatttaaacctt

SEQ ID NO: 2510 - DNA, 20 bp, Artificial sequence
  Synthetic oligonucleotide
actggagacaccatcttcgg

SEQ ID NO: 2511 - DNA, 20 bp, Artificial sequence
  Synthetic oligonucleotide
gagagactccacctgtccaa

SEQ ID NO: 2512 - DNA, 20 bp, Artificial sequence
  Synthetic oligonucleotide
aagttgcccactcctgtact

SEQ ID NO: 2513 - DNA, 20 bp, Artificial sequence
  Synthetic oligonucleotide
gaattattcccatgggctca

SEQ ID NO: 2514 - DNA, 20 bp, Artificial sequence
  Synthetic oligonucleotide
ctgcggaatcccctcctgca

SEQ ID NO: 2515 - DNA, 20 bp, Artificial sequence
  Synthetic oligonucleotide
cactggcttccggacagcca

SEQ ID NO: 2516 - DNA, 20 bp, Artificial sequence
  Synthetic oligonucleotide
tccagaagaacaaacctacc

SEQ ID NO: 2517 - DNA, 20 bp, Artificial sequence
  Synthetic oligonucleotide
tgggcccgcacatctcacat

SEQ ID NO: 2518 - DNA, 20 bp, Artificial sequence
  Synthetic oligonucleotide
ggatgatccaccccagacgg

SEQ ID NO: 2519 - DNA, 20 bp, Artificial sequence
  Synthetic oligonucleotide
gtgctcagccctttgcttca

SEQ ID NO: 2520 - DNA, 20 bp, Artificial sequence
  Synthetic oligonucleotide
ctgctcaaaccatcaggacc

SEQ ID NO: 2521 - DNA, 20 bp, Artificial sequence
  Synthetic oligonucleotide
tcttggtttccaatcatcat

SEQ ID NO: 2522 - DNA, 20 bp, Artificial sequence
  Synthetic oligonucleotide
ctgcacatcccgatttggcc

SEQ ID NO: 2523 - DNA, 20 bp, Artificial sequence
  Synthetic oligonucleotide
ctgtccacttcctccaccgg

SEQ ID NO: 2524 - DNA, 20 bp, Artificial sequence
  Synthetic oligonucleotide
accacgctagacctcaggct

SEQ ID NO: 2525 - DNA, 20 bp, Artificial sequence
  Synthetic oligonucleotide
acagtgccccctcagtgggc

SEQ ID NO: 2526 - DNA, 20 bp, Artificial sequence
  Synthetic oligonucleotide
ggacacagttcaatcccgaa

SEQ ID NO: 2527 - DNA, 20 bp, Artificial sequence
  Synthetic oligonucleotide
gtggaccttccatcgctcct

SEQ ID NO: 2528 - DNA, 20 bp, Artificial sequence
  Synthetic oligonucleotide
cagaattctccattcctgat

SEQ ID NO: 2529 - DNA, 20 bp, Artificial sequence
  Synthetic oligonucleotide
tctccctccaatagaacctc

SEQ ID NO: 2530 - DNA, 20 bp, Artificial sequence
  Synthetic oligonucleotide
ttatgactcaatgagcccaa

SEQ ID NO: 2531 - DNA, 20 bp, Artificial sequence
  Synthetic oligonucleotide
ggagactcatcccaccccac

SEQ ID NO: 2532 - DNA, 20 bp, Artificial sequence
  Synthetic oligonucleotide
aggagctaatgaaacagcct

SEQ ID NO: 2533 - DNA, 20 bp, Artificial sequence
  Synthetic oligonucleotide
caccaccaagaaacatcgca

SEQ ID NO: 2534 - DNA, 20 bp, Artificial sequence
  Synthetic oligonucleotide
ctagacaatccaccctggat

SEQ ID NO: 2535 - DNA, 20 bp, Artificial sequence
  Synthetic oligonucleotide
tcagggtcatcctcgaagcc

SEQ ID NO: 2536 - DNA, 20 bp, Artificial sequence
  Synthetic oligonucleotide
gaggaaaactccaatgctgc

SEQ ID NO: 2537 - DNA, 20 bp, Artificial sequence
  Synthetic oligonucleotide
aaggagacctcactgctcac

SEQ ID NO: 2538 - DNA, 20 bp, Artificial sequence
  Synthetic oligonucleotide
gtacaaaccagtaaggaacc

SEQ ID NO: 2539 - DNA, 20 bp, Artificial sequence
  Synthetic oligonucleotide
ccgccatgcctccctgacat

SEQ ID NO: 2540 - DNA, 20 bp, Artificial sequence
  Synthetic oligonucleotide
ggattcgccctctcagggtc

SEQ ID NO: 2541 - DNA, 20 bp, Artificial sequence
  Synthetic oligonucleotide
tggcaggtccaccctccccc

SEQ ID NO: 2542 - DNA, 20 bp, Artificial sequence
  Synthetic oligonucleotide
gccacccttcccaaactcag

SEQ ID NO: 2543 - DNA, 20 bp, Artificial sequence
  Synthetic oligonucleotide
gtgcatcaccaggcgagccc

SEQ ID NO: 2544 - DNA, 20 bp, Artificial sequence
  Synthetic oligonucleotide
tgggatggcttctaatggca

SEQ ID NO: 2545 - DNA, 20 bp, Artificial sequence
  Synthetic oligonucleotide
acccctctcacatgcccggc

SEQ ID NO: 2546 - DNA, 20 bp, Artificial sequence
  Synthetic oligonucleotide
tgtttgtgcccaccacctct

SEQ ID NO: 2547 - DNA, 20 bp, Artificial sequence
  Synthetic oligonucleotide
tgagctggccctccccccgc

SEQ ID NO: 2548 - DNA, 20 bp, Artificial sequence
  Synthetic oligonucleotide
cgggaagctccacaccagct

SEQ ID NO: 2549 - DNA, 20 bp, Artificial sequence
  Synthetic oligonucleotide
actgctgccattcacatgac

SEQ ID NO: 2550 - DNA, 20 bp, Artificial sequence
  Synthetic oligonucleotide
ggctggcccaactctagctg

SEQ ID NO: 2551 - DNA, 20 bp, Artificial sequence
  Synthetic oligonucleotide
gtgagctccacctcatgccg

SEQ ID NO: 2552 - DNA, 20 bp, Artificial sequence
  Synthetic oligonucleotide
gatggaagcccccttcaacc

SEQ ID NO: 2553 - DNA, 20 bp, Artificial sequence
  Synthetic oligonucleotide
cagctcatttcactccggca

SEQ ID NO: 2554 - DNA, 20 bp, Artificial sequence
  Synthetic oligonucleotide
ggcatgggacaatctccccc

SEQ ID NO: 2555 - DNA, 20 bp, Artificial sequence
  Synthetic oligonucleotide
acacaggtccataccccacc

SEQ ID NO: 2556 - DNA, 20 bp, Artificial sequence
  Synthetic oligonucleotide
aggtcgggctatctaaccca

SEQ ID NO: 2557 - DNA, 20 bp, Artificial sequence
  Synthetic oligonucleotide
caggctactccccccaggcc

SEQ ID NO: 2558 - DNA, 20 bp, Artificial sequence
  Synthetic oligonucleotide
ccacgccatctcctgagttc

SEQ ID NO: 2559 - DNA, 20 bp, Artificial sequence
  Synthetic oligonucleotide
gccagactcacccaacccta

SEQ ID NO: 2560 - DNA, 20 bp, Artificial sequence
  Synthetic oligonucleotide
gggttgtggacctctaggta

SEQ ID NO: 2561 - DNA, 20 bp, Artificial sequence
  Synthetic oligonucleotide
cctttgctcccctgtgggcc

SEQ ID NO: 2562 - DNA, 20 bp, Artificial sequence
  Synthetic oligonucleotide
gcggccctcactctccggcc

SEQ ID NO: 2563 - DNA, 20 bp, Artificial sequence
  Synthetic oligonucleotide
cccctccccacctactgcgg

SEQ ID NO: 2564 - DNA, 20 bp, Artificial sequence
  Synthetic oligonucleotide
gtgaaagaccctctctggtc

SEQ ID NO: 2565 - DNA, 20 bp, Artificial sequence
  Synthetic oligonucleotide
cccgttctcccaccttgact

SEQ ID NO: 2566 - DNA, 20 bp, Artificial sequence
  Synthetic oligonucleotide
ctgcatctcccgatatagcc

SEQ ID NO: 2567 - DNA, 20 bp, Artificial sequence
  Synthetic oligonucleotide
accatcggcacacaacccat

SEQ ID NO: 2568 - DNA, 20 bp, Artificial sequence
  Synthetic oligonucleotide
ccgtattcttcctgaagact

SEQ ID NO: 2569 - DNA, 20 bp, Artificial sequence
  Synthetic oligonucleotide
gcttgggacagcaaacagcc

SEQ ID NO: 2570 - DNA, 20 bp, Artificial sequence
  Synthetic oligonucleotide
atccctgtccacacagggtc

SEQ ID NO: 2571 - DNA, 20 bp, Artificial sequence
  Synthetic oligonucleotide
tcacacccagcagacagccg

SEQ ID NO: 2572 - DNA, 20 bp, Artificial sequence
  Synthetic oligonucleotide
agtcacctcccactgcctgc

SEQ ID NO: 2573 - DNA, 20 bp, Artificial sequence
  Synthetic oligonucleotide
ctgacagcttctcctggcca

SEQ ID NO: 2574 - DNA, 20 bp, Artificial sequence
  Synthetic oligonucleotide
tatattcaatcaacttagga

SEQ ID NO: 2575 - DNA, 20 bp, Artificial sequence
  Synthetic oligonucleotide
cccgagctaacacccgtcct

SEQ ID NO: 2576 - DNA, 20 bp, Artificial sequence
  Synthetic oligonucleotide
gaccccagcacatcctggcc

SEQ ID NO: 2577 - DNA, 20 bp, Artificial sequence
  Synthetic oligonucleotide
tgctccagcctttccgtgga

SEQ ID NO: 2578 - DNA, 20 bp, Artificial sequence
  Synthetic oligonucleotide
cacagatcttcatagcaacc

SEQ ID NO: 2579 - DNA, 20 bp, Artificial sequence
  Synthetic oligonucleotide
acctgtctcctctctcccgt

SEQ ID NO: 2580 - DNA, 20 bp, Artificial sequence
  Synthetic oligonucleotide
gagcaccaccacaaaaagga

SEQ ID NO: 2581 - DNA, 20 bp, Artificial sequence
  Synthetic oligonucleotide
gcggcacttccaccttaccc

SEQ ID NO: 2582 - DNA, 20 bp, Artificial sequence
  Synthetic oligonucleotide
cttcctgcccaatatcggaa

SEQ ID NO: 2583 - DNA, 20 bp, Artificial sequence
  Synthetic oligonucleotide
tgcatgtcaccccaccagca

SEQ ID NO: 2584 - DNA, 20 bp, Artificial sequence
  Synthetic oligonucleotide
cccccacctttaccctggct

SEQ ID NO: 2585 - DNA, 20 bp, Artificial sequence
  Synthetic oligonucleotide
gtgtttctacataagccaca

SEQ ID NO: 2586 - DNA, 20 bp, Artificial sequence
  Synthetic oligonucleotide
gtttatctggcaaacagcaa

SEQ ID NO: 2587 - DNA, 20 bp, Artificial sequence
  Synthetic oligonucleotide
tttctgacctcactaggcct

SEQ ID NO: 2588 - DNA, 20 bp, Artificial sequence
  Synthetic oligonucleotide
aggctcagtctttccagtca

SEQ ID NO: 2589 - DNA, 20 bp, Artificial sequence
  Synthetic oligonucleotide
actggagccctcccagaccc

SEQ ID NO: 2590 - DNA, 20 bp, Artificial sequence
  Synthetic oligonucleotide
cccctaaaccaccactgccc

SEQ ID NO: 2591 - DNA, 20 bp, Artificial sequence
  Synthetic oligonucleotide
gacccaacttccactttgca

SEQ ID NO: 2592 - DNA, 20 bp, Artificial sequence
  Synthetic oligonucleotide
cttccctctcatcctataga

SEQ ID NO: 2593 - DNA, 20 bp, Artificial sequence
  Synthetic oligonucleotide
gtgcctctaacatagacact

SEQ ID NO: 2594 - DNA, 20 bp, Artificial sequence
  Synthetic oligonucleotide
gcatttcactcactcaggac

SEQ ID NO: 2595 - DNA, 20 bp, Artificial sequence
  Synthetic oligonucleotide
acaggttccgcagcggcggc

SEQ ID NO: 2596 - DNA, 20 bp, Artificial sequence
  Synthetic oligonucleotide
gagcccatttcccaagttca

SEQ ID NO: 2597 - DNA, 20 bp, Artificial sequence
  Synthetic oligonucleotide
ctcaaactctcctagtgggt

SEQ ID NO: 2598 - DNA, 20 bp, Artificial sequence
  Synthetic oligonucleotide
cagcaggccaccaccccgtc

SEQ ID NO: 2599 - DNA, 20 bp, Artificial sequence
  Synthetic oligonucleotide
aaagcatgcatcccccgaca

SEQ ID NO: 2600 - DNA, 20 bp, Artificial sequence
  Synthetic oligonucleotide
gaccatcgccccacactcca

SEQ ID NO: 2601 - DNA, 20 bp, Artificial sequence
  Synthetic oligonucleotide
gagacatccccaccgcaacc

SEQ ID NO: 2602 - DNA, 20 bp, Artificial sequence
  Synthetic oligonucleotide
ttggagttcccacagtgtga

SEQ ID NO: 2603 - DNA, 20 bp, Artificial sequence
  Synthetic oligonucleotide
acgctgtctaatcagctccc

SEQ ID NO: 2604 - DNA, 20 bp, Artificial sequence
  Synthetic oligonucleotide
caccgtgtcctcacacgctc

SEQ ID NO: 2605 - DNA, 20 bp, Artificial sequence
  Synthetic oligonucleotide
cagctccattacctctgctc

SEQ ID NO: 2606 - DNA, 20 bp, Artificial sequence
  Synthetic oligonucleotide
atggtccaccttgaatggtc

SEQ ID NO: 2607 - DNA, 20 bp, Artificial sequence
  Synthetic oligonucleotide
ctgctaatccccctcaccac

SEQ ID NO: 2608 - DNA, 20 bp, Artificial sequence
  Synthetic oligonucleotide
cccaaccatccccagaggac

SEQ ID NO: 2609 - DNA, 20 bp, Artificial sequence
  Synthetic oligonucleotide
gctcagcgaacttaattata

SEQ ID NO: 2610 - DNA, 20 bp, Artificial sequence
  Synthetic oligonucleotide
tcacaggccacctgttcccc

SEQ ID NO: 2611 - DNA, 20 bp, Artificial sequence
  Synthetic oligonucleotide
gggagcctcaccatgccctt

SEQ ID NO: 2612 - DNA, 20 bp, Artificial sequence
  Synthetic oligonucleotide
caccatcacccaacagcatg

SEQ ID NO: 2613 - DNA, 20 bp, Artificial sequence
  Synthetic oligonucleotide
cttcatggtcctcatggata

SEQ ID NO: 2614 - DNA, 20 bp, Artificial sequence
  Synthetic oligonucleotide
cggctgctccatgatgcagt

SEQ ID NO: 2615 - DNA, 20 bp, Artificial sequence
  Synthetic oligonucleotide
cagaaaatgaccaactcact

SEQ ID NO: 2616 - DNA, 20 bp, Artificial sequence
  Synthetic oligonucleotide
gattggtgaatcaaagccaa

SEQ ID NO: 2617 - DNA, 20 bp, Artificial sequence
  Synthetic oligonucleotide
tggctgagccctcccgtccc

SEQ ID NO: 2618 - DNA, 20 bp, Artificial sequence
  Synthetic oligonucleotide
tgcagacgcatccatttcct

SEQ ID NO: 2619 - DNA, 20 bp, Artificial sequence
  Synthetic oligonucleotide
gatatggctcctactccacc

SEQ ID NO: 2620 - DNA, 20 bp, Artificial sequence
  Synthetic oligonucleotide
gccacgcccctcgccgacca

SEQ ID NO: 2621 - DNA, 20 bp, Artificial sequence
  Synthetic oligonucleotide
gaaatggacacacccggaca

SEQ ID NO: 2622 - DNA, 20 bp, Artificial sequence
  Synthetic oligonucleotide
gaggctccactgccttgcca

SEQ ID NO: 2623 - DNA, 20 bp, Artificial sequence
  Synthetic oligonucleotide
ggctttgctttaaaaggtaa

SEQ ID NO: 2624 - DNA, 20 bp, Artificial sequence
  Synthetic oligonucleotide
tgtcactgtccaccagggca

SEQ ID NO: 2625 - DNA, 20 bp, Artificial sequence
  Synthetic oligonucleotide
aatggtccaccccagacgat

SEQ ID NO: 2626 - DNA, 20 bp, Artificial sequence
  Synthetic oligonucleotide
gcaccccacaaccccaagtc

SEQ ID NO: 2627 - DNA, 20 bp, Artificial sequence
  Synthetic oligonucleotide
agacccaccatctccccaga

SEQ ID NO: 2628 - DNA, 20 bp, Artificial sequence
  Synthetic oligonucleotide
caattgctaaaccacacttt

SEQ ID NO: 2629 - DNA, 20 bp, Artificial sequence
  Synthetic oligonucleotide
ggccacagattataacccac

SEQ ID NO: 2630 - DNA, 20 bp, Artificial sequence
  Synthetic oligonucleotide
gtagggcactcacctggatc

SEQ ID NO: 2631 - DNA, 20 bp, Artificial sequence
  Synthetic oligonucleotide
agtgccggaatcctcaccct

SEQ ID NO: 2632 - DNA, 20 bp, Artificial sequence
  Synthetic oligonucleotide
ggtgcttttccatagcagct

SEQ ID NO: 2633 - DNA, 20 bp, Artificial sequence
  Synthetic oligonucleotide
gccaggcacccataggtcaa

SEQ ID NO: 2634 - DNA, 20 bp, Artificial sequence
  Synthetic oligonucleotide
cagaaagccaattccagctc

SEQ ID NO: 2635 - DNA, 20 bp, Artificial sequence
  Synthetic oligonucleotide
ctggcatccaccggctcccc

SEQ ID NO: 2636 - DNA, 20 bp, Artificial sequence
  Synthetic oligonucleotide
ctggtgccttctacaggctc

SEQ ID NO: 2637 - DNA, 20 bp, Artificial sequence
  Synthetic oligonucleotide
cagggcagaattaccttgca

SEQ ID NO: 2638 - DNA, 20 bp, Artificial sequence
  Synthetic oligonucleotide
cgtcctcccacctcacacgg

SEQ ID NO: 2639 - DNA, 20 bp, Artificial sequence
  Synthetic oligonucleotide
ctgccagccccctcagcgga

SEQ ID NO: 2640 - DNA, 20 bp, Artificial sequence
  Synthetic oligonucleotide
ctgagcactcttacgcataa

SEQ ID NO: 2641 - DNA, 20 bp, Artificial sequence
  Synthetic oligonucleotide
gtcccatctccacacagggc

SEQ ID NO: 2642 - DNA, 20 bp, Artificial sequence
  Synthetic oligonucleotide
ggacctcaaccccctacttg

SEQ ID NO: 2643 - DNA, 20 bp, Artificial sequence
  Synthetic oligonucleotide
ggtctttctcctcccaccac

SEQ ID NO: 2644 - DNA, 20 bp, Artificial sequence
  Synthetic oligonucleotide
caccccccaattcctacctc

SEQ ID NO: 2645 - DNA, 20 bp, Artificial sequence
  Synthetic oligonucleotide
gtcttagccaccaaggcctt

SEQ ID NO: 2646 - DNA, 20 bp, Artificial sequence
  Synthetic oligonucleotide
cagctgtacccacaggcggc

SEQ ID NO: 2647 - DNA, 20 bp, Artificial sequence
  Synthetic oligonucleotide
cagaggctccctaggagcac

SEQ ID NO: 2648 - DNA, 20 bp, Artificial sequence
  Synthetic oligonucleotide
ctataatgctctcatggctc

SEQ ID NO: 2649 - DNA, 20 bp, Artificial sequence
  Synthetic oligonucleotide
gatccacactccagaagaac

SEQ ID NO: 2650 - DNA, 20 bp, Artificial sequence
  Synthetic oligonucleotide
tccaaactcacaggctactc

SEQ ID NO: 2651 - DNA, 20 bp, Artificial sequence
  Synthetic oligonucleotide
acaggccattcccactcgct

SEQ ID NO: 2652 - DNA, 20 bp, Artificial sequence
  Synthetic oligonucleotide
cttaattacctctaaagaac

SEQ ID NO: 2653 - DNA, 20 bp, Artificial sequence
  Synthetic oligonucleotide
acgacaggcaacagcagcct

SEQ ID NO: 2654 - DNA, 20 bp, Artificial sequence
  Synthetic oligonucleotide
accgtggccacctgcatgac

SEQ ID NO: 2655 - DNA, 20 bp, Artificial sequence
  Synthetic oligonucleotide
gcaggtagtcatacacagat

SEQ ID NO: 2656 - DNA, 20 bp, Artificial sequence
  Synthetic oligonucleotide
tgggctcattattagagcac

SEQ ID NO: 2657 - DNA, 20 bp, Artificial sequence
  Synthetic oligonucleotide
gacagattcaaaaacaggcc

SEQ ID NO: 2658 - DNA, 20 bp, Artificial sequence
  Synthetic oligonucleotide
gcaggcctccccattgtcca

SEQ ID NO: 2659 - DNA, 20 bp, Artificial sequence
  Synthetic oligonucleotide
agctctatcttcccagacac

SEQ ID NO: 2660 - DNA, 20 bp, Artificial sequence
  Synthetic oligonucleotide
ctggacattctcaaagtgcc

SEQ ID NO: 2661 - DNA, 20 bp, Artificial sequence
  Synthetic oligonucleotide
ccagaggacccacctgcagt

SEQ ID NO: 2662 - DNA, 20 bp, Artificial sequence
  Synthetic oligonucleotide
tccaggatccctatgggctc

SEQ ID NO: 2663 - DNA, 20 bp, Artificial sequence
  Synthetic oligonucleotide
cagtgcctcacacgcggtca

SEQ ID NO: 2664 - DNA, 20 bp, Artificial sequence
  Synthetic oligonucleotide
gcccaaaactacagcggtct

SEQ ID NO: 2665 - DNA, 20 bp, Artificial sequence
  Synthetic oligonucleotide
tggccttgtcttacttctta

SEQ ID NO: 2666 - DNA, 20 bp, Artificial sequence
  Synthetic oligonucleotide
gcccatccacccacttggac

SEQ ID NO: 2667 - DNA, 20 bp, Artificial sequence
  Synthetic oligonucleotide
caggtgcttgaccttagcct

SEQ ID NO: 2668 - DNA, 20 bp, Artificial sequence
  Synthetic oligonucleotide
tgctcaactccagagaacca

SEQ ID NO: 2669 - DNA, 20 bp, Artificial sequence
  Synthetic oligonucleotide
cagcatccaaacccacggtg

SEQ ID NO: 2670 - DNA, 20 bp, Artificial sequence
  Synthetic oligonucleotide
gaagctctaatccctggcca

SEQ ID NO: 2671 - DNA, 20 bp, Artificial sequence
  Synthetic oligonucleotide
tcagtgacactcaaaagtgc

SEQ ID NO: 2672 - DNA, 20 bp, Artificial sequence
  Synthetic oligonucleotide
gcgactctgaacctctgcct

SEQ ID NO: 2673 - DNA, 20 bp, Artificial sequence
  Synthetic oligonucleotide
cagctggaactcctgacacc

SEQ ID NO: 2674 - DNA, 20 bp, Artificial sequence
  Synthetic oligonucleotide
tgcaaccctgcccattgcca

SEQ ID NO: 2675 - DNA, 20 bp, Artificial sequence
  Synthetic oligonucleotide
agggaaccccaccacatcac

SEQ ID NO: 2676 - DNA, 20 bp, Artificial sequence
  Synthetic oligonucleotide
cgcacccctctcacatgccc

SEQ ID NO: 2677 - DNA, 20 bp, Artificial sequence
  Synthetic oligonucleotide
gctgggcccgcatctggagc

SEQ ID NO: 2678 - DNA, 20 bp, Artificial sequence
  Synthetic oligonucleotide
ccaagattaccctcaggatc

SEQ ID NO: 2679 - DNA, 20 bp, Artificial sequence
  Synthetic oligonucleotide
cccttaaccacctgtgcatc

SEQ ID NO: 2680 - DNA, 20 bp, Artificial sequence
  Synthetic oligonucleotide
tgacgggaccatactcagga

SEQ ID NO: 2681 - DNA, 20 bp, Artificial sequence
  Synthetic oligonucleotide
gcgcagcccagccctagctt

SEQ ID NO: 2682 - DNA, 20 bp, Artificial sequence
  Synthetic oligonucleotide
ggtccaccccagacagtcca

SEQ ID NO: 2683 - DNA, 20 bp, Artificial sequence
  Synthetic oligonucleotide
acgggtccccatcttgccta

SEQ ID NO: 2684 - DNA, 20 bp, Artificial sequence
  Synthetic oligonucleotide
cgcctgaatcccccacgcca

SEQ ID NO: 2685 - DNA, 20 bp, Artificial sequence
  Synthetic oligonucleotide
ccaaagctcacaacactcag

SEQ ID NO: 2686 - DNA, 20 bp, Artificial sequence
  Synthetic oligonucleotide
tctgttttacactaatgcgg

SEQ ID NO: 2687 - DNA, 20 bp, Artificial sequence
  Synthetic oligonucleotide
tggatggtcccccctggaca

SEQ ID NO: 2688 - DNA, 20 bp, Artificial sequence
  Synthetic oligonucleotide
ccaaagtctcccccctaccc

SEQ ID NO: 2689 - DNA, 20 bp, Artificial sequence
  Synthetic oligonucleotide
gctggccccacatgcaggca

SEQ ID NO: 2690 - DNA, 20 bp, Artificial sequence
  Synthetic oligonucleotide
aaaactctcctcactagcct

SEQ ID NO: 2691 - DNA, 20 bp, Artificial sequence
  Synthetic oligonucleotide
cccacacgccatacagttat

SEQ ID NO: 2692 - DNA, 20 bp, Artificial sequence
  Synthetic oligonucleotide
caagtcctcacctgcaatcc

SEQ ID NO: 2693 - DNA, 20 bp, Artificial sequence
  Synthetic oligonucleotide
ccaacaggttctacctacca

SEQ ID NO: 2694 - DNA, 20 bp, Artificial sequence
  Synthetic oligonucleotide
aagcccccaactcacttgcc

SEQ ID NO: 2695 - DNA, 20 bp, Artificial sequence
  Synthetic oligonucleotide
cacccgtcaccctctgcacc

SEQ ID NO: 2696 - DNA, 20 bp, Artificial sequence
  Synthetic oligonucleotide
ccctgctcagcacgaagcca

SEQ ID NO: 2697 - DNA, 20 bp, Artificial sequence
  Synthetic oligonucleotide
tgagctcccaactctgtcca

SEQ ID NO: 2698 - DNA, 20 bp, Artificial sequence
  Synthetic oligonucleotide
gcataacacaaatattgcca

SEQ ID NO: 2699 - DNA, 20 bp, Artificial sequence
  Synthetic oligonucleotide
gtccttggcattcactgagc

SEQ ID NO: 2700 - DNA, 20 bp, Artificial sequence
  Synthetic oligonucleotide
aggctgggcattatccctca

SEQ ID NO: 2701 - DNA, 20 bp, Artificial sequence
  Synthetic oligonucleotide
gactgggatcccacctggcc

SEQ ID NO: 2702 - DNA, 20 bp, Artificial sequence
  Synthetic oligonucleotide
tcccaggcttctcttgggac

SEQ ID NO: 2703 - DNA, 20 bp, Artificial sequence
  Synthetic oligonucleotide
ccgggttcgcccttactcat

SEQ ID NO: 2704 - DNA, 20 bp, Artificial sequence
  Synthetic oligonucleotide
ctgcaattcaacactgcctt

SEQ ID NO: 2705 - DNA, 20 bp, Artificial sequence
  Synthetic oligonucleotide
cccagaccatcatcgatgcc

SEQ ID NO: 2706 - DNA, 20 bp, Artificial sequence
  Synthetic oligonucleotide
ctgctgtccactcctgaaca

SEQ ID NO: 2707 - DNA, 20 bp, Artificial sequence
  Synthetic oligonucleotide
aagctgctaaaagaaatgcc

SEQ ID NO: 2708 - DNA, 20 bp, Artificial sequence
  Synthetic oligonucleotide
gcatgtcgccctggctgcct

SEQ ID NO: 2709 - DNA, 20 bp, Artificial sequence
  Synthetic oligonucleotide
gatctgattggaaataggtc

SEQ ID NO: 2710 - DNA, 20 bp, Artificial sequence
  Synthetic oligonucleotide
caccagctcatttcactccg

SEQ ID NO: 2711 - DNA, 20 bp, Artificial sequence
  Synthetic oligonucleotide
gtggagactcatcccacccc

SEQ ID NO: 2712 - DNA, 20 bp, Artificial sequence
  Synthetic oligonucleotide
atgaattattcccatgggct

SEQ ID NO: 2713 - DNA, 20 bp, Artificial sequence
  Synthetic oligonucleotide
gcctcttctgcaaatgggac

SEQ ID NO: 2714 - DNA, 20 bp, Artificial sequence
  Synthetic oligonucleotide
gaactggaccacgctagacc

SEQ ID NO: 2715 - DNA, 20 bp, Artificial sequence
  Synthetic oligonucleotide
atataaccaccccctacccc

SEQ ID NO: 2716 - DNA, 20 bp, Artificial sequence
  Synthetic oligonucleotide
gccattcccactcgctgtgc

SEQ ID NO: 2717 - DNA, 20 bp, Artificial sequence
  Synthetic oligonucleotide
agctcacaacactcagggta

SEQ ID NO: 2718 - DNA, 20 bp, Artificial sequence
  Synthetic oligonucleotide
tcatagggcctgcctagcct

SEQ ID NO: 2719 - DNA, 20 bp, Artificial sequence
  Synthetic oligonucleotide
gccattttaaccctctttgc

SEQ ID NO: 2720 - DNA, 20 bp, Artificial sequence
  Synthetic oligonucleotide
gaagctgcaattcagagcat

SEQ ID NO: 2721 - DNA, 20 bp, Artificial sequence
  Synthetic oligonucleotide
ttgccaggacctcactggct

SEQ ID NO: 2722 - DNA, 20 bp, Artificial sequence
  Synthetic oligonucleotide
ccagctcatttcactccggc

SEQ ID NO: 2723 - DNA, 20 bp, Artificial sequence
  Synthetic oligonucleotide
cgctcactccctgattctga

SEQ ID NO: 2724 - DNA, 20 bp, Artificial sequence
  Synthetic oligonucleotide
ctggatgatccaccccagac

SEQ ID NO: 2725 - DNA, 20 bp, Artificial sequence
  Synthetic oligonucleotide
cacccctctcacatgcccgg

SEQ ID NO: 2726 - DNA, 20 bp, Artificial sequence
  Synthetic oligonucleotide
tagtgcctccccccacggca

SEQ ID NO: 2727 - DNA, 20 bp, Artificial sequence
  Synthetic oligonucleotide
ggtgagctggccctcccccc

SEQ ID NO: 2728 - DNA, 20 bp, Artificial sequence
  Synthetic oligonucleotide
gcctgctgcacatcccgatt

SEQ ID NO: 2729 - DNA, 20 bp, Artificial sequence
  Synthetic oligonucleotide
tttgggataataataggtcc

SEQ ID NO: 2730 - DNA, 20 bp, Artificial sequence
  Synthetic oligonucleotide
cccacgggaccctcactgcc

SEQ ID NO: 2731 - DNA, 20 bp, Artificial sequence
  Synthetic oligonucleotide
ctgccagccctaacttagct

SEQ ID NO: 2732 - DNA, 20 bp, Artificial sequence
  Synthetic oligonucleotide
cccctactctctgctggtca

SEQ ID NO: 2733 - DNA, 20 bp, Artificial sequence
  Synthetic oligonucleotide
tggctcccaccccatggact

SEQ ID NO: 2734 - DNA, 20 bp, Artificial sequence
  Synthetic oligonucleotide
ctggctggcccaactctagc

SEQ ID NO: 2735 - DNA, 20 bp, Artificial sequence
  Synthetic oligonucleotide
ccctaggtcctgcccaggcc

SEQ ID NO: 2736 - DNA, 20 bp, Artificial sequence
  Synthetic oligonucleotide
gagtcttgaaaccatggtcc

SEQ ID NO: 2737 - DNA, 20 bp, Artificial sequence
  Synthetic oligonucleotide
ctatcttcccagacacactc

SEQ ID NO: 2738 - DNA, 20 bp, Artificial sequence
  Synthetic oligonucleotide
ggccggaacacactttcact

SEQ ID NO: 2739 - DNA, 20 bp, Artificial sequence
  Synthetic oligonucleotide
ctggttccaccatcaagagc

SEQ ID NO: 2740 - DNA, 20 bp, Artificial sequence
  Synthetic oligonucleotide
gagtcccaccaccaagaaac

SEQ ID NO: 2741 - DNA, 20 bp, Artificial sequence
  Synthetic oligonucleotide
catgaatgtccctaagagca

SEQ ID NO: 2742 - DNA, 20 bp, Artificial sequence
  Synthetic oligonucleotide
agttatgactcaatgagccc

SEQ ID NO: 2743 - DNA, 20 bp, Artificial sequence
  Synthetic oligonucleotide
ccactctccctccaatagaa

SEQ ID NO: 2744 - DNA, 20 bp, Artificial sequence
  Synthetic oligonucleotide
ccacagggctctgcccgccc

SEQ ID NO: 2745 - DNA, 20 bp, Artificial sequence
  Synthetic oligonucleotide
gaggcttaagtctcaggtca

SEQ ID NO: 2746 - DNA, 20 bp, Artificial sequence
  Synthetic oligonucleotide
ttggcaggtccaccctcccc

SEQ ID NO: 2747 - DNA, 20 bp, Artificial sequence
  Synthetic oligonucleotide
ttgtgtcacacacatgagtc

SEQ ID NO: 2748 - DNA, 20 bp, Artificial sequence
  Synthetic oligonucleotide
gtcttggtttccaatcatca

SEQ ID NO: 2749 - DNA, 20 bp, Artificial sequence
  Synthetic oligonucleotide
ttcagggtcatcctcgaagc

SEQ ID NO: 2750 - DNA, 20 bp, Artificial sequence
  Synthetic oligonucleotide
tcggtggaccttccatcgct

SEQ ID NO: 2751 - DNA, 20 bp, Artificial sequence
  Synthetic oligonucleotide
cacagatcccacctgtgtgt

SEQ ID NO: 2752 - DNA, 20 bp, Artificial sequence
  Synthetic oligonucleotide
ggcggatcccagcctctgca

SEQ ID NO: 2753 - DNA, 20 bp, Artificial sequence
  Synthetic oligonucleotide
acccgtctgctcaaaccatc

SEQ ID NO: 2754 - DNA, 20 bp, Artificial sequence
  Synthetic oligonucleotide
tgctcactgaccctgagtca

SEQ ID NO: 2755 - DNA, 20 bp, Artificial sequence
  Synthetic oligonucleotide
catctccccaatagcagggt

SEQ ID NO: 2756 - DNA, 20 bp, Artificial sequence
  Synthetic oligonucleotide
ccagggtttaatgatcccct

SEQ ID NO: 2757 - DNA, 20 bp, Artificial sequence
  Synthetic oligonucleotide
gaggagctaatgaaacagcc

SEQ ID NO: 2758 - DNA, 20 bp, Artificial sequence
  Synthetic oligonucleotide
cactcctgaacactcaggaa

SEQ ID NO: 2759 - DNA, 20 bp, Artificial sequence
  Synthetic oligonucleotide
gatcttggctcacccagatc

SEQ ID NO: 2760 - DNA, 20 bp, Artificial sequence
  Synthetic oligonucleotide
accttgcaaatatcccaggt

SEQ ID NO: 2761 - DNA, 20 bp, Artificial sequence
  Synthetic oligonucleotide
caaggagacctcactgctca

SEQ ID NO: 2762 - DNA, 20 bp, Artificial sequence
  Synthetic oligonucleotide
aggttctacctaccaaggga

SEQ ID NO: 2763 - DNA, 20 bp, Artificial sequence
  Synthetic oligonucleotide
cgtacaaaccagtaaggaac

SEQ ID NO: 2764 - DNA, 20 bp, Artificial sequence
  Synthetic oligonucleotide
tctgtccacttcctccaccg

SEQ ID NO: 2765 - DNA, 20 bp, Artificial sequence
  Synthetic oligonucleotide
tcattcccgccatctgcgga

SEQ ID NO: 2766 - DNA, 20 bp, Artificial sequence
  Synthetic oligonucleotide
gacacaggtccataccccac

SEQ ID NO: 2767 - DNA, 20 bp, Artificial sequence
  Synthetic oligonucleotide
agagagactccacctgtcca

SEQ ID NO: 2768 - DNA, 20 bp, Artificial sequence
  Synthetic oligonucleotide
ccgggaagctccacaccagc

SEQ ID NO: 2769 - DNA, 20 bp, Artificial sequence
  Synthetic oligonucleotide
agggtcagaccctctgagcc

SEQ ID NO: 2770 - DNA, 20 bp, Artificial sequence
  Synthetic oligonucleotide
gaggtttctacagccaccgt

SEQ ID NO: 2771 - DNA, 20 bp, Artificial sequence
  Synthetic oligonucleotide
ctacgggtatgaaaaagtca

SEQ ID NO: 2772 - DNA, 20 bp, Artificial sequence
  Synthetic oligonucleotide
gctttgatatataaatcttg

SEQ ID NO: 2773 - DNA, 20 bp, Artificial sequence
  Synthetic oligonucleotide
gtcacgggacagctcaccca

SEQ ID NO: 2774 - DNA, 20 bp, Artificial sequence
  Synthetic oligonucleotide
caacactgccttactgtgaa

SEQ ID NO: 2775 - DNA, 20 bp, Artificial sequence
  Synthetic oligonucleotide
gcagaattctccattcctga

SEQ ID NO: 2776 - DNA, 20 bp, Artificial sequence
  Synthetic oligonucleotide
aggcagacgacccctggtct

SEQ ID NO: 2777 - DNA, 20 bp, Artificial sequence
  Synthetic oligonucleotide
aaagttgcccactcctgtac

SEQ ID NO: 2778 - DNA, 20 bp, Artificial sequence
  Synthetic oligonucleotide
tctgagacccatctgggtct

SEQ ID NO: 2779 - DNA, 20 bp, Artificial sequence
  Synthetic oligonucleotide
cctagacaatccaccctgga

SEQ ID NO: 2780 - DNA, 20 bp, Artificial sequence
  Synthetic oligonucleotide
cgttagagaattacacaaaa

SEQ ID NO: 2781 - DNA, 20 bp, Artificial sequence
  Synthetic oligonucleotide
acaccagcgcacacctgcca

SEQ ID NO: 2782 - DNA, 20 bp, Artificial sequence
  Synthetic oligonucleotide
acaggctactccccccaggc

SEQ ID NO: 2783 - DNA, 20 bp, Artificial sequence
  Synthetic oligonucleotide
gcccttactcatcagtggcc

SEQ ID NO: 2784 - DNA, 20 bp, Artificial sequence
  Synthetic oligonucleotide
ggtgagctccacctcatgcc

SEQ ID NO: 2785 - DNA, 20 bp, Artificial sequence
  Synthetic oligonucleotide
cacgagtaccctctgccagc

SEQ ID NO: 2786 - DNA, 20 bp, Artificial sequence
  Synthetic oligonucleotide
cactccagaagaacaaacct

SEQ ID NO: 2787 - DNA, 20 bp, Artificial sequence
  Synthetic oligonucleotide
aaccccaccacatcactggc

SEQ ID NO: 2788 - DNA, 20 bp, Artificial sequence
  Synthetic oligonucleotide
accagagtccccaccggagc

SEQ ID NO: 2789 - DNA, 20 bp, Artificial sequence
  Synthetic oligonucleotide
ggagtgtccctctgcacccc

SEQ ID NO: 2790 - DNA, 20 bp, Artificial sequence
  Synthetic oligonucleotide
aacaggttccgcagcggcgg

SEQ ID NO: 2791 - DNA, 20 bp, Artificial sequence
  Synthetic oligonucleotide
gcagtcacctcccactgcct

SEQ ID NO: 2792 - DNA, 20 bp, Artificial sequence
  Synthetic oligonucleotide
gcagctccattacctctgct

SEQ ID NO: 2793 - DNA, 20 bp, Artificial sequence
  Synthetic oligonucleotide
cgtgtttctacataagccac

SEQ ID NO: 2794 - DNA, 20 bp, Artificial sequence
  Synthetic oligonucleotide
caagcggcacttccacctta

SEQ ID NO: 2795 - DNA, 20 bp, Artificial sequence
  Synthetic oligonucleotide
ccacccaccctcatcgcggc

SEQ ID NO: 2796 - DNA, 20 bp, Artificial sequence
  Synthetic oligonucleotide
catgtcctgcttaatgcctg

SEQ ID NO: 2797 - DNA, 20 bp, Artificial sequence
  Synthetic oligonucleotide
tgcatttcactcactcagga

SEQ ID NO: 2798 - DNA, 20 bp, Artificial sequence
  Synthetic oligonucleotide
ggagacccaccatctcccca

SEQ ID NO: 2799 - DNA, 20 bp, Artificial sequence
  Synthetic oligonucleotide
cttctgagtccaaactggga

SEQ ID NO: 2800 - DNA, 20 bp, Artificial sequence
  Synthetic oligonucleotide
cagacactcaacttgacctc

SEQ ID NO: 2801 - DNA, 20 bp, Artificial sequence
  Synthetic oligonucleotide
gccctgaccatcgccccaca

SEQ ID NO: 2802 - DNA, 20 bp, Artificial sequence
  Synthetic oligonucleotide
ggctcagcttccctctcgct

SEQ ID NO: 2803 - DNA, 20 bp, Artificial sequence
  Synthetic oligonucleotide
aggtgcctctaacatagaca

SEQ ID NO: 2804 - DNA, 20 bp, Artificial sequence
  Synthetic oligonucleotide
ttagcagctaaaacgacacc

SEQ ID NO: 2805 - DNA, 20 bp, Artificial sequence
  Synthetic oligonucleotide
gcacagatcttcatagcaac

SEQ ID NO: 2806 - DNA, 20 bp, Artificial sequence
  Synthetic oligonucleotide
attccatccagatatggctc

SEQ ID NO: 2807 - DNA, 20 bp, Artificial sequence
  Synthetic oligonucleotide
gcggtccacctcctaatacc

SEQ ID NO: 2808 - DNA, 20 bp, Artificial sequence
  Synthetic oligonucleotide
ttactgagcaccactgcagt

SEQ ID NO: 2809 - DNA, 20 bp, Artificial sequence
  Synthetic oligonucleotide
aacgaacccacagcccaccg

SEQ ID NO: 2810 - DNA, 20 bp, Artificial sequence
  Synthetic oligonucleotide
cacgctgtctaatcagctcc

SEQ ID NO: 2811 - DNA, 20 bp, Artificial sequence
  Synthetic oligonucleotide
attcaattgctaaaccacac

SEQ ID NO: 2812 - DNA, 20 bp, Artificial sequence
  Synthetic oligonucleotide
ctcatttgtttatctggcaa

SEQ ID NO: 2813 - DNA, 20 bp, Artificial sequence
  Synthetic oligonucleotide
tctactgacccctctggaac

SEQ ID NO: 2814 - DNA, 20 bp, Artificial sequence
  Synthetic oligonucleotide
ggagcccatttcccaagttc

SEQ ID NO: 2815 - DNA, 20 bp, Artificial sequence
  Synthetic oligonucleotide
ccaggtttatgatcgaggga

SEQ ID NO: 2816 - DNA, 20 bp, Artificial sequence
  Synthetic oligonucleotide
aaggtcttcacaggccacct

SEQ ID NO: 2817 - DNA, 20 bp, Artificial sequence
  Synthetic oligonucleotide
ccttccctctcatcctatag

SEQ ID NO: 2818 - DNA, 20 bp, Artificial sequence
  Synthetic oligonucleotide
tctgctaatccccctcacca

SEQ ID NO: 2819 - DNA, 20 bp, Artificial sequence
  Synthetic oligonucleotide
tttacaaatcttcatggtcc

SEQ ID NO: 2820 - DNA, 20 bp, Artificial sequence
  Synthetic oligonucleotide
aggctttgctttaaaaggta

SEQ ID NO: 2821 - DNA, 20 bp, Artificial sequence
  Synthetic oligonucleotide
tgcgggatctgtagtaggcc

SEQ ID NO: 2822 - DNA, 20 bp, Artificial sequence
  Synthetic oligonucleotide
agactctgccactcctgcac

SEQ ID NO: 2823 - DNA, 20 bp, Artificial sequence
  Synthetic oligonucleotide
tgcagacccaacttccactt

SEQ ID NO: 2824 - DNA, 20 bp, Artificial sequence
  Synthetic oligonucleotide
tgacgaggctccactgcctt

SEQ ID NO: 2825 - DNA, 20 bp, Artificial sequence
  Synthetic oligonucleotide
gcaccatcacccaacagcat

SEQ ID NO: 2826 - DNA, 20 bp, Artificial sequence
  Synthetic oligonucleotide
cggccacagattataaccca

SEQ ID NO: 2827 - DNA, 20 bp, Artificial sequence
  Synthetic oligonucleotide
gaatggtccaccccagacga

SEQ ID NO: 2828 - DNA, 20 bp, Artificial sequence
  Synthetic oligonucleotide
atgcatgtcaccccaccagc

SEQ ID NO: 2829 - DNA, 20 bp, Artificial sequence
  Synthetic oligonucleotide
ttcaactgctcagcgaactt

SEQ ID NO: 2830 - DNA, 20 bp, Artificial sequence
  Synthetic oligonucleotide
agagacatccccaccgcaac

SEQ ID NO: 2831 - DNA, 20 bp, Artificial sequence
  Synthetic oligonucleotide
acatggccccatacaggcac

SEQ ID NO: 2832 - DNA, 20 bp, Artificial sequence
  Synthetic oligonucleotide
gcccctaaaccaccactgcc

SEQ ID NO: 2833 - DNA, 20 bp, Artificial sequence
  Synthetic oligonucleotide
aaacaggtccctcccgagct

SEQ ID NO: 2834 - DNA, 20 bp, Artificial sequence
  Synthetic oligonucleotide
cacttcctgcccaatatcgg

SEQ ID NO: 2835 - DNA, 20 bp, Artificial sequence
  Synthetic oligonucleotide
gcggcacacactatagcctc

SEQ ID NO: 2836 - DNA, 20 bp, Artificial sequence
  Synthetic oligonucleotide
gctgacagcttctcctggcc

SEQ ID NO: 2837 - DNA, 20 bp, Artificial sequence
  Synthetic oligonucleotide
aggatggtcatccttcggct

SEQ ID NO: 2838 - DNA, 20 bp, Artificial sequence
  Synthetic oligonucleotide
ggtggtgcccttcatggagc

SEQ ID NO: 2839 - DNA, 20 bp, Artificial sequence
  Synthetic oligonucleotide
gtctgctcacctcacttgct

SEQ ID NO: 2840 - DNA, 20 bp, Artificial sequence
  Synthetic oligonucleotide
tctccgagcaccaccacaaa

SEQ ID NO: 2841 - DNA, 20 bp, Artificial sequence
  Synthetic oligonucleotide
cagagctctaacacctggga

SEQ ID NO: 2842 - DNA, 20 bp, Artificial sequence
  Synthetic oligonucleotide
gctgcttctaacttccagaa

SEQ ID NO: 2843 - DNA, 20 bp, Artificial sequence
  Synthetic oligonucleotide
ttgtcactgtccaccagggc

SEQ ID NO: 2844 - DNA, 20 bp, Artificial sequence
  Synthetic oligonucleotide
tccgtcacacccagcagaca

SEQ ID NO: 2845 - DNA, 20 bp, Artificial sequence
  Synthetic oligonucleotide
atgccagactcacccaaccc

SEQ ID NO: 2846 - DNA, 20 bp, Artificial sequence
  Synthetic oligonucleotide
gcccaaccatccccagagga

SEQ ID NO: 2847 - DNA, 20 bp, Artificial sequence
  Synthetic oligonucleotide
gctggaggccctcgcagctc

SEQ ID NO: 2848 - DNA, 20 bp, Artificial sequence
  Synthetic oligonucleotide
gctcagaaaatgaccaactc

SEQ ID NO: 2849 - DNA, 20 bp, Artificial sequence
  Synthetic oligonucleotide
cccgtattcttcctgaagac

SEQ ID NO: 2850 - DNA, 20 bp, Artificial sequence
  Synthetic oligonucleotide
ctgttgtccccagcaggcca

SEQ ID NO: 2851 - DNA, 20 bp, Artificial sequence
  Synthetic oligonucleotide
gaactctaccttcagcccgt

SEQ ID NO: 2852 - DNA, 20 bp, Artificial sequence
  Synthetic oligonucleotide
tctgcccgtcctctcccctt

SEQ ID NO: 2853 - DNA, 20 bp, Artificial sequence
  Synthetic oligonucleotide
gatgctctcaccaggagcct

SEQ ID NO: 2854 - DNA, 20 bp, Artificial sequence
  Synthetic oligonucleotide
gctgcggccctcactctccg

SEQ ID NO: 2855 - DNA, 20 bp, Artificial sequence
  Synthetic oligonucleotide
ctccgacctttactccaggc

SEQ ID NO: 2856 - DNA, 20 bp, Artificial sequence
  Synthetic oligonucleotide
gacccaaacttcaagccacc

SEQ ID NO: 2857 - DNA, 20 bp, Artificial sequence
  Synthetic oligonucleotide
cagttctccttctcaaactc

SEQ ID NO: 2858 - DNA, 20 bp, Artificial sequence
  Synthetic oligonucleotide
ctgggacccatctggacccc

SEQ ID NO: 2859 - DNA, 20 bp, Artificial sequence
  Synthetic oligonucleotide
tgccaggcacccataggtca

SEQ ID NO: 2860 - DNA, 20 bp, Artificial sequence
  Synthetic oligonucleotide
ctagatggtccaccttgaat

SEQ ID NO: 2861 - DNA, 20 bp, Artificial sequence
  Synthetic oligonucleotide
tcaagggcttttactggtgc

SEQ ID NO: 2862 - DNA, 20 bp, Artificial sequence
  Synthetic oligonucleotide
gcatatattcaatcaactta

SEQ ID NO: 2863 - DNA, 20 bp, Artificial sequence
  Synthetic oligonucleotide
gtttctgacctcactaggcc

SEQ ID NO: 2864 - DNA, 20 bp, Artificial sequence
  Synthetic oligonucleotide
ttcatggtcctcatggatac

SEQ ID NO: 2865 - DNA, 20 bp, Artificial sequence
  Synthetic oligonucleotide
aggatctcccagggctgccg

SEQ ID NO: 2866 - DNA, 20 bp, Artificial sequence
  Synthetic oligonucleotide
aaggtaagtgtaaaatggtc

SEQ ID NO: 2867 - DNA, 20 bp, Artificial sequence
  Synthetic oligonucleotide
agcaccagacaccagcccaa

SEQ ID NO: 2868 - DNA, 20 bp, Artificial sequence
  Synthetic oligonucleotide
gaaaatgaccaactcactgg

SEQ ID NO: 2869 - DNA, 20 bp, Artificial sequence
  Synthetic oligonucleotide
ggccctgttcaaacactata

SEQ ID NO: 2870 - DNA, 20 bp, Artificial sequence
  Synthetic oligonucleotide
tcaggaggcccttcaagctc

SEQ ID NO: 2871 - DNA, 20 bp, Artificial sequence
  Synthetic oligonucleotide
aacatcgccattcccagagt

SEQ ID NO: 2872 - DNA, 20 bp, Artificial sequence
  Synthetic oligonucleotide
ccgtgtcctcacacgctcct

SEQ ID NO: 2873 - DNA, 20 bp, Artificial sequence
  Synthetic oligonucleotide
gaggcggtacatccacgggc

SEQ ID NO: 2874 - DNA, 20 bp, Artificial sequence
  Synthetic oligonucleotide
gcagacgcatccatttcctc

SEQ ID NO: 2875 - DNA, 20 bp, Artificial sequence
  Synthetic oligonucleotide
acagcaaacagcccagggtc

SEQ ID NO: 2876 - DNA, 20 bp, Artificial sequence
  Synthetic oligonucleotide
agggcactcacctggatcgc

SEQ ID NO: 2877 - DNA, 20 bp, Artificial sequence
  Synthetic oligonucleotide
cccaacttccactttgcaaa

SEQ ID NO: 2878 - DNA, 20 bp, Artificial sequence
  Synthetic oligonucleotide
cgtgtggtccccctcgccac

SEQ ID NO: 2879 - DNA, 20 bp, Artificial sequence
  Synthetic oligonucleotide
tccctgtccacacagggtca

SEQ ID NO: 2880 - DNA, 20 bp, Artificial sequence
  Synthetic oligonucleotide
atatggctcctactccacct

SEQ ID NO: 2881 - DNA, 20 bp, Artificial sequence
  Synthetic oligonucleotide
cccataggtcaaaaagggcc

SEQ ID NO: 2882 - DNA, 20 bp, Artificial sequence
  Synthetic oligonucleotide
cgaggcataaacacacttac

SEQ ID NO: 2883 - DNA, 20 bp, Artificial sequence
  Synthetic oligonucleotide
accctgctttcagctgggcc

SEQ ID NO: 2884 - DNA, 20 bp, Artificial sequence
  Synthetic oligonucleotide
tcactaggcctccatgcacc

SEQ ID NO: 2885 - DNA, 20 bp, Artificial sequence
  Synthetic oligonucleotide
ccctaaaccaccactgcccc

SEQ ID NO: 2886 - DNA, 20 bp, Artificial sequence
  Synthetic oligonucleotide
tctctggccaccacaaggct

SEQ ID NO: 2887 - DNA, 20 bp, Artificial sequence
  Synthetic oligonucleotide
gccacagattataacccaca

SEQ ID NO: 2888 - DNA, 20 bp, Artificial sequence
  Synthetic oligonucleotide
gacaagagaacatctgtgcc

SEQ ID NO: 2889 - DNA, 20 bp, Artificial sequence
  Synthetic oligonucleotide
ctcagcgaacttaattatat

SEQ ID NO: 2890 - DNA, 20 bp, Artificial sequence
  Synthetic oligonucleotide
ccctccccacctactgcgga

SEQ ID NO: 2891 - DNA, 20 bp, Artificial sequence
  Synthetic oligonucleotide
tcaaactctcctagtgggtt

SEQ ID NO: 2892 - DNA, 20 bp, Artificial sequence
  Synthetic oligonucleotide
cagatcttcatagcaaccca

SEQ ID NO: 2893 - DNA, 20 bp, Artificial sequence
  Synthetic oligonucleotide
ggcacttccaccttacccag

SEQ ID NO: 2894 - DNA, 20 bp, Artificial sequence
  Synthetic oligonucleotide
ggcacacaacccatgtgccc

SEQ ID NO: 2895 - DNA, 20 bp, Artificial sequence
  Synthetic oligonucleotide
cccaagtcccataagatgct

SEQ ID NO: 2896 - DNA, 20 bp, Artificial sequence
  Synthetic oligonucleotide
tgccggaatcctcaccctta

SEQ ID NO: 2897 - DNA, 20 bp, Artificial sequence
  Synthetic oligonucleotide
gcagacagccgacccagcct

SEQ ID NO: 2898 - DNA, 20 bp, Artificial sequence
  Synthetic oligonucleotide
tgggctgtcattacagtgtg

SEQ ID NO: 2899 - DNA, 20 bp, Artificial sequence
  Synthetic oligonucleotide
ggctgtgacacccagtgggt

SEQ ID NO: 2900 - DNA, 20 bp, Artificial sequence
  Synthetic oligonucleotide
cccagaggcaccagcgggta

SEQ ID NO: 2901 - DNA, 20 bp, Artificial sequence
  Synthetic oligonucleotide
acatgcgcacagaaatgaac

SEQ ID NO: 2902 - DNA, 20 bp, Artificial sequence
  Synthetic oligonucleotide
ggcagagtgcctactgcgca

SEQ ID NO: 2903 - DNA, 20 bp, Artificial sequence
  Synthetic oligonucleotide
ctccactgccttgccacaca

SEQ ID NO: 2904 - DNA, 20 bp, Artificial sequence
  Synthetic oligonucleotide
ggtgaatcaaagccaagccg

SEQ ID NO: 2905 - DNA, 20 bp, Artificial sequence
  Synthetic oligonucleotide
agaaagccaattccagctca

SEQ ID NO: 2906 - DNA, 20 bp, Artificial sequence
  Synthetic oligonucleotide
gcgccctgccccagacgcac

SEQ ID NO: 2907 - DNA, 20 bp, Artificial sequence
  Synthetic oligonucleotide
cctctgagtctccttcgggc

SEQ ID NO: 2908 - DNA, 20 bp, Artificial sequence
  Synthetic oligonucleotide
ggctcacccaccgtgatgat

SEQ ID NO: 2909 - DNA, 20 bp, Artificial sequence
  Synthetic oligonucleotide
ccagactcacccaaccctac

SEQ ID NO: 2910 - DNA, 20 bp, Artificial sequence
  Synthetic oligonucleotide
tgtggctctcccttgcagaa

SEQ ID NO: 2911 - DNA, 20 bp, Artificial sequence
  Synthetic oligonucleotide
gacccaccatctccccagaa

SEQ ID NO: 2912 - DNA, 20 bp, Artificial sequence
  Synthetic oligonucleotide
tgcatctcccgatatagccc

SEQ ID NO: 2913 - DNA, 20 bp, Artificial sequence
  Synthetic oligonucleotide
gtcagcggcatcactgtccc

SEQ ID NO: 2914 - DNA, 20 bp, Artificial sequence
  Synthetic oligonucleotide
gcaggtgccttcctttgccg

SEQ ID NO: 2915 - DNA, 20 bp, Artificial sequence
  Synthetic oligonucleotide
ccgacctttactccaggcct

SEQ ID NO: 2916 - DNA, 20 bp, Artificial sequence
  Synthetic oligonucleotide
cagcccaccccagatggtcc

SEQ ID NO: 2917 - DNA, 20 bp, Artificial sequence
  Synthetic oligonucleotide
gtgggccccacctctgtccg

SEQ ID NO: 2918 - DNA, 20 bp, Artificial sequence
  Synthetic oligonucleotide
catgcatcccccgacataca

SEQ ID NO: 2919 - DNA, 20 bp, Artificial sequence
  Synthetic oligonucleotide
accccagcacatcctggcct

SEQ ID NO: 2920 - DNA, 20 bp, Artificial sequence
  Synthetic oligonucleotide
tcccagacccctcaccaaac

SEQ ID NO: 2921 - DNA, 20 bp, Artificial sequence
  Synthetic oligonucleotide
gcaccaccacaaaaaggaga

SEQ ID NO: 2922 - DNA, 20 bp, Artificial sequence
  Synthetic oligonucleotide
gggagatgcctcccacttcc

SEQ ID NO: 2923 - DNA, 20 bp, Artificial sequence
  Synthetic oligonucleotide
cccatggtgcttcctagggc

SEQ ID NO: 2924 - DNA, 20 bp, Artificial sequence
  Synthetic oligonucleotide
gcttcaggcctttcgcacac

SEQ ID NO: 2925 - DNA, 20 bp, Artificial sequence
  Synthetic oligonucleotide
agcagctgactctcccgccc

SEQ ID NO: 2926 - DNA, 20 bp, Artificial sequence
  Synthetic oligonucleotide
aattgctaaaccacactttt

SEQ ID NO: 2927 - DNA, 20 bp, Artificial sequence
  Synthetic oligonucleotide
accatcgccccacactccac

SEQ ID NO: 2928 - DNA, 20 bp, Artificial sequence
  Synthetic oligonucleotide
ccctctcatcctatagacac

SEQ ID NO: 2929 - DNA, 20 bp, Artificial sequence
  Synthetic oligonucleotide
agctccattacctctgctct

SEQ ID NO: 2930 - DNA, 20 bp, Artificial sequence
  Synthetic oligonucleotide
tgaccagaccccagaatctc

SEQ ID NO: 2931 - DNA, 20 bp, Artificial sequence
  Synthetic oligonucleotide
agacatccccaccgcaaccc

SEQ ID NO: 2932 - DNA, 20 bp, Artificial sequence
  Synthetic oligonucleotide
gctccagcctttccgtggac

SEQ ID NO: 2933 - DNA, 20 bp, Artificial sequence
  Synthetic oligonucleotide
cgctgtctaatcagctccca

SEQ ID NO: 2934 - DNA, 20 bp, Artificial sequence
  Synthetic oligonucleotide
atattcaatcaacttaggac

SEQ ID NO: 2935 - DNA, 20 bp, Artificial sequence
  Synthetic oligonucleotide
tgaaagaccctctctggtct

SEQ ID NO: 2936 - DNA, 20 bp, Artificial sequence
  Synthetic oligonucleotide
gcatgtcaccccaccagcag

SEQ ID NO: 2937 - DNA, 20 bp, Artificial sequence
  Synthetic oligonucleotide
cctgccagaacttttggaca

SEQ ID NO: 2938 - DNA, 20 bp, Artificial sequence
  Synthetic oligonucleotide
gggtcagcccacaagcctca

SEQ ID NO: 2939 - DNA, 20 bp, Artificial sequence
  Synthetic oligonucleotide
gaagactcccctgagcctct

1.-54. (canceled)

55. A modified oligonucleotide consisting of 20 linked nucleosides, wherein the modified oligonucleotide has the nucleobase sequence of 5′-GCATCCATTTAATAGAAGTT-3′ (SEQ ID NO: 1188), wherein the modified oligonucleotide has a sugar motif of 5′-eeeeeddddddddddeeeee-3′, wherein
e is a 2′-OCH₂CH₂OCH₃ ribosyl sugar moiety; and
d is a 2′-β-D-deoxyribosyl sugar moiety; and
wherein the modified oligonucleotide has an internucleoside linkage motif of 5′-soooossssssssssooss-3′, wherein
s is a phosphorothioate internucleoside linkage; and
o is a phosphodiester internucleoside linkage; and
wherein each C is a 5-methylcytosine.

56. The modified oligonucleotide of claim 55, which is a salt.

57. The modified oligonucleotide of claim 56, which is a sodium salt, a potassium salt, or a combination thereof.

58. An oligomeric compound of claim 55 comprising a conjugate group.

59. A population of modified oligonucleotides of claim 55, wherein all of the phosphorothioate internucleoside linkages of the modified oligonucleotide are stereorandom.

60. A population of oligomeric compounds of claim 58, wherein all of the phosphorothioate internucleoside linkages of the modified oligonucleotide are stereorandom.

61. A pharmaceutical composition comprising a modified oligonucleotide of claim 55 and a pharmaceutically acceptable diluent.

62. The pharmaceutical composition of claim 61, wherein the pharmaceutically acceptable diluent is an artificial cerebrospinal fluid or phosphate-buffered saline (PBS).

63. The pharmaceutical composition of claim 62, wherein the pharmaceutical composition consists essentially of the modified oligonucleotide and the artificial cerebrospinal fluid.

64. The pharmaceutical composition of claim 62, wherein the pharmaceutical composition consists essentially of the modified oligonucleotide and PBS.

65. A pharmaceutical composition comprising an oligomeric compound of claim 58 and a pharmaceutically acceptable diluent.

66. The pharmaceutical composition of claim 65, wherein the pharmaceutically acceptable diluent is an artificial cerebrospinal fluid or phosphate-buffered saline (PBS).

67. The pharmaceutical composition of claim 66, wherein the pharmaceutical composition consists essentially of the oligomeric compound and the artificial cerebrospinal fluid.

68. The pharmaceutical composition of claim 66, wherein the pharmaceutical composition consists essentially of the oligomeric compound and PBS.

69. A pharmaceutical composition comprising a population of modified oligonucleotides of claim 59 and a pharmaceutically acceptable diluent.

70. The pharmaceutical composition of claim 69, wherein the pharmaceutically acceptable diluent is an artificial cerebrospinal fluid or phosphate-buffered saline (PBS).

71. The pharmaceutical composition of claim 70, wherein the pharmaceutical composition consists essentially of the population of modified oligonucleotides and the artificial cerebrospinal fluid.

72. A pharmaceutical composition comprising a population of oligomeric compounds of claim 60 and a pharmaceutically acceptable diluent.

73. The pharmaceutical composition of claim 72, wherein the pharmaceutically acceptable diluent is an artificial cerebrospinal fluid or phosphate-buffered saline (PBS).

74. The pharmaceutical composition of claim 73, wherein the pharmaceutical composition consists essentially of the population of oligomeric compounds and the artificial cerebrospinal fluid.

75. The pharmaceutical composition of claim 70, wherein the pharmaceutical composition consists essentially of the population of modified oligonucleotides and PBS.

76. The pharmaceutical composition of claim 73, wherein the pharmaceutical composition consists essentially of the population of oligomeric compounds and PBS.

77. A pharmaceutical composition comprising a modified oligonucleotide of claim 56 and a pharmaceutically acceptable diluent.

78. The pharmaceutical composition of claim 77, wherein the pharmaceutically acceptable diluent is an artificial cerebrospinal fluid or phosphate-buffered saline (PBS).

79. The pharmaceutical composition of claim 78, wherein the pharmaceutical composition consists essentially of the modified oligonucleotide and the artificial cerebrospinal fluid.

80. The pharmaceutical composition of claim 78, wherein the pharmaceutical composition consists essentially of the modified oligonucleotide and PBS.

81. A pharmaceutical composition comprising a modified oligonucleotide of claim 57 and a pharmaceutically acceptable diluent.

82. The pharmaceutical composition of claim 81, wherein the pharmaceutically acceptable diluent is an artificial cerebrospinal fluid or phosphate-buffered saline (PBS).

83. The pharmaceutical composition of claim 82, wherein the pharmaceutical composition consists essentially of the modified oligonucleotide and the artificial cerebrospinal fluid.

84. The pharmaceutical composition of claim 82, wherein the pharmaceutical composition consists essentially of the modified oligonucleotide and PBS.

85. A population of modified oligonucleotides of claim 56, wherein all of the phosphorothioate internucleoside linkages of the modified oligonucleotide are stereorandom.

86. A population of modified oligonucleotides of claim 57, wherein all of the phosphorothioate internucleoside linkages of the modified oligonucleotide are stereorandom.

87. A pharmaceutical composition comprising a population of modified oligonucleotides of claim 85 and a pharmaceutically acceptable diluent.

88. The pharmaceutical composition of claim 87, wherein the pharmaceutically acceptable diluent is an artificial cerebrospinal fluid or phosphate-buffered saline (PBS).

89. The pharmaceutical composition of claim 88, wherein the pharmaceutical composition consists essentially of the population of modified oligonucleotides and the artificial cerebrospinal fluid.

90. The pharmaceutical composition of claim 88, wherein the pharmaceutical composition consists essentially of the population of modified oligonucleotides and PBS.

91. A pharmaceutical composition comprising a population of modified oligonucleotides of claim 86 and a pharmaceutically acceptable diluent.

92. The pharmaceutical composition of claim 91, wherein the pharmaceutically acceptable diluent is an artificial cerebrospinal fluid or phosphate-buffered saline (PBS).

93. The pharmaceutical composition of claim 92, wherein the pharmaceutical composition consists essentially of the population of modified oligonucleotides and the artificial cerebrospinal fluid.

94. The pharmaceutical composition of claim 92, wherein the pharmaceutical composition consists essentially of the population of modified oligonucleotides and PBS.
